(19) United States
(12) Patent Application Publication
(10) Pub. No.: US 2023/0139325 A1
(43) Pub. Date: May 4, 2023

(54) IMPROVING MILK PRODUCTION AND COMPOSITIONAL CHARACTERISTICS WITH NOVEL RUMINOCOCCUS BOVIS

(71) Applicant: Native Microbials, Inc., San Diego, CA (US)

(72) Inventors: Mallory EMBREE, San Diego, CA (US); Jordan EMBREE, San Diego, CA (US); Sean GILMORE, San Diego, CA (US)

(73) Assignee: Native Microbials, Inc., San Diego, CA (US)

(21) Appl. No.: 17/916,432

(22) PCT Filed: Mar. 31, 2021
(86) PCT No.: PCT/US2021/025264

§ 371 Date: Sep. 30, 2022

Related U.S. Application Data
(60) Provisional application No. 63/002,588, filed on Mar. 31, 2020.

(51) Int. Cl. A61K 35/74; A61K 36/064; A61K 9/00; A61K 35/742; A23K 10/18; A23K 50/10; A23K 10/30; A23K 40/35

(52) U.S. Cl. CPC A61K 35/74; A61K 36/064; A61K 9/0056; A61K 35/742; A23K 10/18; A23K 50/10; A23K 10/30; A23K 40/35; A61K 2035/11

(57) ABSTRACT

The disclosure relates to isolated microorganisms—including novel strains of the microorganisms such as Ruminococcus bovis sp. nov.—microbial ensembles, and compositions comprising the same. Furthermore, the disclosure teaches methods of utilizing the described microorganisms, microbial ensembles, and compositions comprising the same, in methods for modulating the production and yield of milk and milk components in ruminants. In particular aspects, the disclosure provides methods of increasing desirable components of milk in ruminants. Furthermore, the disclosure provides for methods of modulating the rumen microbiome.

### CROSS-REFERENCE TO RELATED APPLICATIONS

[0001] This application claims the benefit of priority to U.S. Provisional Application No. 63/002,588, filed on Mar. 31, 2020, hereby incorporated by reference in its entirety.

### FIELD

[0002] The present disclosure relates to isolated and biologically pure microorganisms that have applications, inter alia, in dairy production. The disclosed microorganisms can be utilized in their isolated and biologically pure states, as well as being formulated into compositions. Furthermore, the disclosure provides microbial ensembles, containing at least two members of the disclosed microorganisms, as well as methods of utilizing said microbial ensembles. Furthermore, the disclosure provides for methods of modulating the rumen microbiome.

### STATEMENT REGARDING SEQUENCE LISTING

[0003] The sequence listing associated with this application is provided in text format in lieu of a paper copy, and is hereby incorporated by reference into the specification. The name of the text file containing the sequence listing is ASBI_021_02WO_ST25.txt. The text file is ˜901 kb, was created on Mar. 31, 2021, and is being submitted electronically via EFS-Web.

### BACKGROUND

[0004] The global population is predicted to increase to over 9 billion people by the year 2050 with a concurrent reduction in the quantity of land, water, and other natural resources available per capita. Projections indicate that the average domestic income will also increase, with the projected rise in the GDP of China and India. The desire for a diet richer in animal-source proteins rises in tandem with increasing income, thus the global livestock sector will be charged with the challenge of producing more milk using fewer resources. The Food and Agriculture Organization of the United Nations predict that 70% more food will have to be produced, yet the area of arable land available will decrease. It is clear that the food output per unit of resource input will have to increase considerably in order to support the rise in population.

[0005] Milk and milk components from lactating ruminants are predominantly utilized in the preparation of foodstuffs in many different forms. Nevertheless, milk and milk components find numerous alternative applications in non-food areas such as the manufacture of glues, textile fibers, plastic materials, or in the production of ethanol or methane. There have been many strategies to improve milk production and content in ruminants through nutritional modulations, hormone treatments, changes in animal management, and selective breeding; however, the need for more efficient production of milk and milk components per animal is required.

[0006] Identifying compositions and methods for sustainably increasing milk production and modulating milk components of interest while balancing animal health and wellbeing have become imperative to satisfy the needs of every day humans in an expanding population. Increasing the worldwide production of milk and further modulating desirable milk components by scaling up the total number of livestock on dairy farms would not only be economically infeasible for many parts of the world, but would further result in negative environmental consequences.

[0007] Thus, meeting global milk and milk component yield expectations, by simply scaling up current high-input agricultural systems—utilized in most of the developed world—is simply not feasible.

[0008] There is therefore an urgent need in the art for improved methods of increasing milk production and further increasing yield of desirable milk components.

### SUMMARY OF THE DISCLOSURE

[0009] In some embodiments, the present disclosure provides an orally deliverable composition for increasing milk production or improving milk compositional characteristics in a ruminant, comprising: (a) Ruminococcus bovis comprising a 16S nucleic acid sequence of SEQ ID NO: 2108; and (b) a carrier suitable for oral ruminant administration. In some embodiments, the Ruminococcus bovis is deposited as TSD-225 or NCTC 14479. In some embodiments, the composition comprises: (a) one or more bacteria comprising a 16S nucleic acid sequence sharing at least about 97% sequence identity to any one of SEQ ID NOs: 1-30 and 2045-2103; and/or (b) one or more fungi comprising an ITS nucleic acid sequence sharing at least about 97% sequence identity to any one of SEQ ID NOs: 31-60 and 2104-2107. In some embodiments, the composition comprises: (a) a Clostridium sp. comprising a 16S nucleic acid sequence sharing at least about 97% sequence identity to SEQ ID NO: 28; (b) a Pichia sp. comprising an ITS nucleic acid sequence sharing at least about 97% sequence identity to SEQ ID NO: 32; and/or (c) a Butyrivibrio sp. comprising a 16S nucleic acid sequence sharing at least about 97% sequence identity to SEQ ID NO: 2067. In some embodiments, the composition comprises: (a) a Clostridium sp. with a deposit accession number of NRRL B-67248; (b) a Pichia sp. with a deposit accession number of NRRL Y-67249; and/or (c) a Butyrivibrio sp. with a deposit accession number of NRRL B-67347.

[0010] In some embodiments, the Ruminococcus bovis comprises one or more mutations in the whole genome. In some embodiments, the one or more mutations are selected from the group consisting of: (a) a G→T substitution at position 297 of SEQ ID NO: 2109; (b) a CC→TA substitution at positions 301-302 of SEQ ID NO: 2111; (c) a T→G substitution at position 307 of SEQ ID NO: 2111; (d) a −A deletion at position 300 of SEQ ID NO: 2113; (e) a CCA→TTC substitution at positions 116-118 of SEQ ID NO: 2115; (f) a +T insertion between positions 105-106 of SEQ ID NO: 2117; (g) a C→T substitution at position 298 of SEQ ID NO: 2119; (h) a C→A substitution at position 298 of SEQ ID NO: 2121; and (i) a +AC insertion between positions 43-44 of SEQ ID NO: 2123.

[0011] In some embodiments, the present disclosure provides an orally deliverable composition for increasing milk production or improving milk compositional characteristics in a ruminant, comprising: (a) Ruminococcus bovis comprising one or more mutations selected from the group consisting of: (i) a G→T substitution at position 297 of SEQ ID NO: 2109; (ii) a CC→TA substitution at positions 301-302 of SEQ ID NO: 2111; (iii) a T→G substitution at position 307 of SEQ ID NO: 2111; (iv) a −A deletion at position 300 of SEQ ID NO: 2113; (v) a CCA→TTC substitution at positions 116-118 of SEQ ID NO: 2115; (vi) a +T insertion between positions 105-106 of SEQ ID NO: 2117; (vii) a C→T substitution at position 298 of SEQ ID NO: 2119; (viii) a C→A substitution at position 298 of SEQ ID NO: 2121; and (ix) a +AC insertion between positions 43-44 of SEQ ID NO: 2123; and (b) a carrier suitable for oral ruminant administration. In some embodiments, the composition comprises: (a) one or more bacteria comprising a 16S nucleic acid sequence sharing at least about 97% sequence identity to any one of SEQ ID NOs: 1-30 and 2045-2103; and/or (b) one or more fungi comprising an ITS nucleic acid sequence sharing at least about 97% sequence identity to any one of SEQ ID NOs: 31-60 and 2104-2107. In some embodiments, the composition comprises: (a) a Clostridium sp. comprising a 16S nucleic acid sequence sharing at least about 97% sequence identity to SEQ ID NO: 28; (b) a Pichia sp. comprising an ITS nucleic acid sequence sharing at least about 97% sequence identity to SEQ ID NO: 32; and/or (c) a Butyrivibrio sp. comprising a 16S nucleic acid sequence sharing at least about 97% sequence identity to SEQ ID NO: 2067. In some embodiments, the composition comprises: (a) a Clostridium sp. with a deposit accession number of NRRL B-67248; (b) a Pichia sp. with a deposit accession number of NRRL Y-67249; and/or (c) a Butyrivibrio sp. with a deposit accession number of NRRL B-67347.

[0012] In some embodiments, the present disclosure provides an orally deliverable composition for increasing milk production or improving milk compositional characteristics in a ruminant, comprising: (a) Ruminococcus bovis comprising a nucleic acid sequence selected from any one of SEQ ID NOs: 2110, 2112, 2114, 2116, 2118, 2120, 2122, or 2124; and (b) a carrier suitable for oral ruminant administration. In some embodiments, the composition comprises: (a) one or more bacteria comprising a 16S nucleic acid sequence sharing at least about 97% sequence identity to any one of SEQ ID NOs: 1-30 and 2045-2103; and/or (b) one or more fungi comprising an ITS nucleic acid sequence sharing at least about 97% sequence identity to any one of SEQ ID NOs: 31-60 and 2104-2107. In some embodiments, the composition comprises: (a) a Clostridium sp. comprising a 16S nucleic acid sequence sharing at least about 97% sequence identity to SEQ ID NO: 28; (b) a Pichia sp. comprising an ITS nucleic acid sequence sharing at least about 97% sequence identity to SEQ ID NO: 32; and/or (c) a Butyrivibrio sp. comprising a 16S nucleic acid sequence sharing at least about 97% sequence identity to SEQ ID NO: 2067. In some embodiments, the composition comprises: (a) a Clostridium sp. with a deposit accession number of NRRL B-67248; (b) a Pichia sp. with a deposit accession number of NRRL Y-67249; and/or (c) a Butyrivibrio sp. with a deposit accession number of NRRL B-67347.

[0013] In some embodiments, the present disclosure provides an orally deliverable composition for increasing milk production or improving milk compositional characteristics in a ruminant, comprising: (a) a Ruminococcus bovis with the deposit accession number PTA-125917, NRRL B-67764, TSD-225, or NCTC 14479; and (b) a carrier suitable for oral ruminant administration. In some embodiments, the composition comprises: (a) one or more bacteria comprising a 16S nucleic acid sequence sharing at least about 97% sequence identity to any one of SEQ ID NOs: 1-30 and 2045-2103; and/or (b) one or more fungi comprising an ITS nucleic acid sequence sharing at least about 97% sequence identity to any one of SEQ ID NOs: 31-60 and 2104-2107. In some embodiments, the composition comprises: (a) a Clostridium sp. comprising a 16S nucleic acid sequence sharing at least about 97% sequence identity to SEQ ID NO; 28; (b) a Pichia sp. comprising an ITS nucleic acid sequence sharing at least about 97% sequence identity to SEQ ID NO: 32; and/or (c) a Butyrivibrio sp. comprising a 16S nucleic acid sequence sharing at least about 97% sequence identity to SEQ ID NO: 2067. In some embodiments, the composition comprises: (a) a Clostridium sp. with a deposit accession number of NRRL B-67248; (b) a Pichia sp. with a deposit accession number of NRRL Y-67249; and/or (c) a Butyrivibrio sp. with a deposit accession number of NRRL B-67347.

[0014] In some embodiments, the ruminant is a cow.

[0015] In some embodiments, a ruminant administered the composition exhibits an increase in milk production that leads to an increase in milk yield or an increase in energy-corrected milk.

[0016] In some embodiments, a ruminant administered the composition exhibits an improved milk compositional characteristic selected from the group consisting of: an increase in milk fat(s), an increase in milk protein(s), an increase of carbohydrates in milk, an increase of vitamins in milk, an increase of minerals in milk, or combinations thereof.

[0017] In some embodiments, a ruminant administered the composition exhibits at least one improved phenotypic trait, selected from the group consisting of: an improved efficiency in feed utilization, improved digestibility, an increase in polysaccharide and lignin degradation, an increase in fatty acid concentration in the rumen, pH balance in the rumen, a reduction in methane emissions, a reduction in manure production, improved dry matter intake, an improved efficiency of nitrogen utilization, or combinations thereof.

[0018] In some embodiments, the composition is formulated to protect Ruminococcus bovis from external stressors prior to entering the gastrointestinal tract of the ruminant. In some embodiments, the composition is formulated to protect the Ruminococcus bovis from oxidative stress. In some embodiments, the composition is formulated to protect the Ruminococcus bovis from moisture.

[0019] In some embodiments, the composition is combined with food. In some embodiments, the composition is combined with cereal, starch, oilseed cake, or vegetable waste. In some embodiments, the composition is combined with hay, haylage, silage, livestock feed, forage, fodder, beans, grains, micro-ingredients, fermentation compositions, mixed ration, total mixed ration, or a mixture thereof.

[0020] In some embodiments, the composition is formulated as a solid, liquid, or mixture thereof. In some embodiments, the composition is dry. In some embodiments, the composition is formulated as a pellet, capsule, granulate, or powder. In some embodiments, the composition is encapsulated. In some embodiments, the composition is encapsulated in a polymer or carbohydrate.

[0021] In some embodiments, the composition is combined with water, medicine, vaccine, or a mixture thereof.

[0022] In some embodiments, the Ruminococcus bovis is present in the composition in an amount of at least 10² cells.

[0023] In some embodiments, the present disclosure provides a method for increasing milk production or improving milk compositional characteristics in a ruminant, the method comprising orally administering to a ruminant an effective amount of any of the compositions disclosed herein.

[0024] In some embodiments, the ruminant administered the effective amount of the ruminant supplement exhibits an increase in milk production that leads to a measured increase in milk yield.

[0025] In some embodiments, the ruminant administered the effective amount of the ruminant supplement exhibits an increase in milk production and improved milk compositional characteristics that leads to a measured increase in energy-corrected milk.

[0026] In some embodiments, the ruminant administered the effective amount of the ruminant supplement exhibits an improved milk compositional characteristic selected from the group consisting of: an increase in milk fat(s), an increase in milk protein(s), an increase of carbohydrates in milk, an increase of vitamins in milk, an increase of minerals in milk, or combinations thereof.

[0027] In some embodiments, the ruminant administered the effective amount of the ruminant supplement exhibits at least a 1% increase in the average production of: milk fat(s), milk protein(s), energy-corrected milk, or combinations thereof.

[0028] In some embodiments, the ruminant administered the effective amount of the ruminant supplement exhibits at least a 10% increase in the average production of: milk fat(s), milk protein(s), energy-corrected milk, or combinations thereof.

[0029] In some embodiments, the ruminant administered the effective amount of the ruminant supplement exhibits at least a 20% increase in the average production of; milk fat(s), milk protein(s), energy-corrected milk, or combinations thereof.

[0030] In some embodiments, the ruminant administered the effective amount of the ruminant supplement, further exhibits at least one improved phenotypic trait, selected from the group consisting of: an improved efficiency in feed utilization, improved digestibility, an increase in polysaccharide and lignin degradation, an increase in fatty acid concentration in the rumen, pH balance in the rumen, a reduction in methane emissions, a reduction in manure production, improved dry matter intake, an improved efficiency of nitrogen utilization, or combinations thereof.

[0031] In some embodiments, the ruminant administered the effective amount of the ruminant supplement, further exhibits a shift in the microbiome of the rumen.

[0032] In some embodiments, the ruminant administered the effective amount of the ruminant supplement, further exhibits a shift in the microbiome of the rumen, wherein a population of microbes present in the rumen before administration of the ruminant supplement increase in abundance after administration of the ruminant supplement.

[0033] In some embodiments, the ruminant administered the effective amount of the ruminant supplement, further exhibits: a shift in the microbiome of the rumen, wherein a population of microbes present in the rumen before administration of the ruminant supplement decrease in abundance after administration of the ruminant supplement.

[0034] In some embodiments, wherein the ruminant administered the effective amount of the ruminant supplement, further exhibits: a shift in the microbiome of the rumen, wherein a first population of microbes present in the rumen before administration of the ruminant supplement increase in abundance after administration of the ruminant supplement, and wherein a second population of microbes present in the rumen before administration of the ruminant supplement decrease in abundance after administration of the ruminant supplement.

[0035] In some embodiments, the present disclosure provides a composition comprising: (a) a Ruminococcus bovis with a deposit accession number of TSD-225 or NCTC 14479; (b) a Clostridium sp. with a deposit accession number of NRRL B-67248; (c) a Pichia sp. with a deposit accession number of NRRL Y-67249; and/or (d) a Butyrivibrio sp. with a deposit accession number of NRRL B-67347.

[0036] In some embodiments, the present disclosure provides a composition that performs the same or better than recombinant bovine growth hormone for increasing milk production or improving milk compositional characteristics in a ruminant, wherein the composition comprises: (a) Ruminococcus bois comprising a 16S nucleic acid sequence of SEQ ID NO: 2108; and (b) a carrier suitable for oral ruminant administration. In some embodiments, the composition comprises: (a) one or more bacteria comprising a 16S nucleic acid sequence sharing at least about 97% sequence identity to any one of SEQ ID NOs: 1-30 and 2045-2103; and/or (b) one or more fungi comprising an ITS nucleic acid sequence sharing at least about 97% sequence identity to any one of SEQ ID NOs: 31-60 and 2104-2107. In some embodiments, the composition comprises: (a) a Clostridium sp. comprising a 16S nucleic acid sequence sharing at least about 97% sequence identity to SEQ ID NO: 28; (b) a Pichia sp. comprising an ITS nucleic acid sequence sharing at least about 97% sequence identity to SEQ ID NO: 32; and/or (c) a Butyrivibrio sp. comprising a 16S nucleic acid sequence sharing at least about 97% sequence identity to SEQ ID NO: 2067. In some embodiments, the composition comprises: (a) a Clostridium sp. with a deposit accession number of NRRL B-67248; (b) a Pichia sp. with a deposit accession number of NRRL Y-67249; and/or (c) a Butyrivibrio sp. with a deposit accession number of NRRL B-67347.

### DESCRIPTION OF THE DRAWINGS

[0037] FIG. 1 shows a general workflow of one embodiment of the method for determining the absolute abundance of one or more active microorganism strains.

[0038] FIG. 2 shows a general workflow of one embodiment of a method for determining the co-occurrence of one or more, or two or more, active microorganism strains in a sample with one or more metadata (environmental) parameters, followed by leveraging cluster analysis and community detection methods on the network of determined relationships.

[0039] FIG. 3 depicts a schematic diagram that illustrates an example process flow for use with an exemplary microbe interaction analysis and selection system, including the determination of MIC scores discussed throughout the present disclosure.

[0040] FIG. 4 shows average nucleotide identity (ANI) between JE7A12^{T} and phylogenetically related organisms as well as standing species in the genus Ruminococcus. NCBI GenBank accession number appended to end of species label.

[0041] FIG. 5 shows the 16S phylogenetic position of JE7A12^{T}. Dendrogram; JE7A12^{T} and the closest 25 Ruminococcus 16S sequences in the RDP database. The tree was constructed using the neighbor-joining method based on the comparison of 1500 nt long sequences. Bootstrap values, resulting from 500 replications, given at each branch point.

[0042] FIG. 6 shows the whole genome phylogenetic position of JE7A12^{T}. Closest cultured neighbors are shown with an asterisks. Branch length is appended to each branch. NCBI GenBank accession numbers in parentheses.

[0043] FIG. 7 shows a methylene blue stain of JE7A12^{T} after 48 hours of incubation viewed at 1000× magnification.

[0044] FIG. 8 shows a Gram stain of JE7A12^{T} after 48 hours of incubation viewed at 1000× magnification.

[0045] FIG. 9 shows milk yield in cows administered control, treatment 1, or treatment 2 over time. B indicates p≤0.05 for control versus treatment 2; and c indicates p≤0.05 for treatment 1 versus treatment 2.

[0046] FIG. 10 shows energy corrected milk (ECM) in cows administered control, treatment 1, or treatment 2 over time. B indicates p<0.05 for control versus treatment 2; and c indicates p≤0.05 for treatment 1 versus treatment 2.

[0047] FIG. 11A shows percent fat in milk from cows administered control, treatment 1, or treatment 2 over time. C indicates p≤0.05 for treatment 1 versus treatment 2.

[0048] FIG. 11B shows pounds (lbs) of fat in milk from cows administered control, treatment 1, or treatment 2 over time. B indicates p<0.05 for control versus treatment 2; and c indicates p<0.05 for treatment 1 versus treatment 2.

[0049] FIG. 12A shows percent protein in milk from cows administered control, treatment 1, or treatment 2 over time. A indicates p≤0.05 for control versus treatment 1; and c indicates p<0.05 for treatment 1 versus treatment 2.

[0050] FIG. 12B shows pounds (lbs) of protein in milk from cows administered control, treatment 1, or treatment 2 over time. B indicates p<0.05 for control versus treatment 2; and c indicates p≤0.05 for treatment 1 versus treatment 2.

[0051] FIG. 13A shows percent lactose in milk from cows administered control, treatment 1, or treatment 2 over time.

[0052] FIG. 13B shows pounds (lbs) of lactose in milk in cows administered control, treatment 1, or treatment 2 over time. B indicates p<0.05 for control versus treatment 2; and c indicates p<0.05 for treatment 1 versus treatment 2.

[0053] FIG. 14A shows dry matter intake in cows administered control, treatment 1, or treatment 2 over time. B indicates p<0.05 for control versus treatment 2; and c indicates p<0.05 for treatment 1 versus treatment 2.

[0054] FIG. 14B shows feed efficiency (energy corrected milk to dry matter intake) in cows administered control, treatment 1, or treatment 2 over time.

[0055] FIG. 15A shows body weight of cows administered control, treatment 1, or treatment 2 over time.

[0056] FIG. 15B shows body condition of cows administered control, treatment 1, or treatment 2 over time.

[0057] FIG. 16A shows energy corrected milk (ECM) in cows administered control, treatment 1, or treatment over time.

[0058] FIG. 16B shows milk fat in cows administered control, treatment 1, or treatment over time.

[0059] FIG. 17A shows milk yield in cows administered control, treatment 1, or treatment over time. Post-peak signifies greater than 90 days in milk.

[0060] FIG. 17B shows energy corrected milk (ECM) in cows administered control, treatment 1, or treatment over time. Post-peak signifies greater than 90 days in milk.

### BUDAPEST TREATY ON THE INTERNATIONAL RECOGNITION OF THE DEPOSIT OF MICROORGANISMS FOR THE PURPOSE OF PATENT PROCEDURES

[0061] Some microorganisms described in this application were deposited with the United States Department of Agriculture (USDA) Agricultural Research Service (ARS) Culture Collection (NRRL®), located at 1815 N. University St., Peoria, Ill. 61604, USA. Some microorganisms described in this application were deposited with the Bigelow National Center for Marine Algae and Microbiota, located at 60 Bigelow Drive, East Boothbay, Me. 04544, USA. Some microorganisms described in this application were also deposited with the American Type Culture Collection (ATCC®), located at 10801 University Blvd., Manassas, Va. 20110, USA. Some microorganisms described in this application were deposited with the National Collection of Type Cultures operated by the Public Health England, located at Porton Down, Salisbury, SP4 0JG, United Kingdom.

[0062] The deposits were made under the terms of the Budapest Treaty on the International Recognition of the Deposit of Microorganisms for the Purposes of Patent Procedure and/or type strain rules and procedures. The deposit accession numbers for the Budapest Treaty deposits and type strains are provided in Table 2. The depository, accession numbers, and corresponding dates of deposit for the microorganisms described in this application are separately provided in Table 4.

[0063] In Table 1, the closest predicted hits for taxonomy of the microbes are listed in columns 2, and 5. Column 2 is the top taxonomic hit predicted by BLAST, and column 5 is the top taxonomic hit for genus+species predicted by BLAST. Table 3 shows the top taxonomic hit predicted by BLAST. The compositions of the present disclosure may contain any one, or any combination, of the microbes listed below in Table 1 and Table 3. The microbes of Table 1 and Table 3 may be administered as a single microbial product and/or as a microbial consortia comprising a combination of microbes from Table 1 and Table 3.

[0064] The strains designated in the tables below have been deposited in the labs of Native Microbials, Inc. since at least before the date of filing of the present application and before the date of deposit with the noted depository institutions.

TABLE 1
Microbes of the present disclosure, including bacteria (1-89) and fungi (90-123).

| | | | | BLAST | | | | | |
|---|---|---|---|---|---|---|---|---|---|
| | | | | Taxonomic | | | | | |
| | BLAST | Blast | | Top Hit | Blast | | | | |
| Predicted Taxa of | Taxonomic | % | Query | w/Genus + | % | Query | Strain | Sequence | MIC |
| Isolated Microbes | Top Hit | Ident. | Cover | Species | Identity | Cover | Designation | Identifier | Score |
| Ruminococcus bovis | Clostridiaceae | 96% | 100% | Ruminococcus | 91% | 82% | Ascusb_5 | SEQ ID | 0.85694 |
| sp. nov. | bacterium | | | bromii | | | | NO: 1 | |
| Ruminococcus bovis | Clostridiaceae | 96% | 100% | Ruminococcus | 91% | 82% | Ascusb_5 | SEQ ID | 0.85694 |
| sp. nov. | bacterium | | | bromii | | | | NO: 2108 | |
| Ruminococcus | Rumen bacterium | 93% | 84% | Ruminococcus | 91% | 82% | Ascusb_7 | SEQ ID | 0.97384 |
| (Genus) | | | | bromii | | | | NO: 2 | |
| Clostridium IV | Rumen bacterium | 89% | 97% | Intestinimonas | 85% | 100% | Ascusb_26 | SEQ ID | 0.82051 |
| (Cluster) | NK4A214 | | | butyriciproducens | | | | NO: 3 | |
| Roseburia (Genus) | Lachnospiraceae | 89% | 100% | Pseudobutyrivibrio | 89% | 96% | Ascusb_27 | SEQ ID | 0.87214 |
| | bacterium | | | ruminis | | | | NO: 4 | |
| Hydrogenoanaero- | Lachnospiraceae | 87% | 93% | Roseburia | 86% | 93% | Ascusb_32 | SEQ ID | 0.81269 |
| bacterium (Genus) | bacterium | | | inulinivorans | | | | NO: 5 | |
| Clostridium XIVa | Eubacterium | 92% | 100% | Eubacterium | 92% | 100% | Ascusb_79 | SEQ ID | 0.82765 |
| (Cluster) | ventriosum | | | ventriosum | | | | NO: 6 | |
| Saccharofermentans | Rumen bacterium | 87% | 100% | Faecalibacterium | 91% | 76% | Ascusb_82 | SEQ ID | 0.93391 |
| (Genus) | | | | prausnitzii | | | | NO: 7 | |
| Saccharofermentans | Saccharofermentans | 100% | 99% | Saccharofermentans | 83% | 92% | Ascusb_102 | SEQ ID | 0.82247 |
| (Genus) | sp. | | | acetigenes | | | | NO: 8 | |
| Butyricicoccus | Clostridium sp. | 87% | 100% | Ruminococcus | 86% | 99% | Ascusb_89 | SEQ ID | 0.74361 |
| (Genus) | | | | flavefaciens | | | | NO: 9 | |
| Papillibacter | Rumen bacterium | 91% | 99% | Clostridium | 88% | 82% | Ascusb_111 | SEQ ID | 0.82772 |
| (Genus) | NK4A214 | | | saccharolyticum | | | | NO: 10 | |
| Ruminococcus | Ruminococcaceae | 100% | 94% | Clostridium | 85% | 99% | Ascusb_119 | SEQ ID | 0.8263 |
| (Genus) | | | | lentocellum | | | | NO: 11 | |
| Hydrogenoanaero- | Rumen bacterium | 85% | 98% | Ruminococcus | 85% | 100% | Ascusb_145 | SEQ ID | 0.81161 |
| bacterium (Genus) | NK4B29 | | | flavefaciens | | | | NO: 12 | |
| Pelotomaculum | Faecalibacterium | 86% | 93% | Faecalibacterium | 86% | 82% | Ascusb_205 | SEQ ID | 0.81461 |
| (Genus) | sp. | | | prausnitzii | | | | NO: 13 | |
| Saccharofermentans | Bacterium | 99% | 91% | Saccharofermentans | 90% | 79% | Ascusb_232 | SEQ ID | 0.81428 |
| (Genus) | MA3003 | | | acetigenes | | | | NO: 14 | |
| Lachnospiraceae | Bacterium | 95% | 93% | Blautia luti | 88% | 92% | Ascusb_252 | SEQ ID | 0.8196 |
| incertae sedis (Family) | VCD3003 | | | | | | | NO: 15 | |
| Butyricicoccus | Ruminococcaceae | 91% | 77% | Clostridium | 83% | 99% | Ascusb_268 | SEQ ID | 0.74813 |
| sensu stricto (Genus) | bacterium | | | lentocellum | | | | NO: 16 | |
| Lachnospiraceae | Bacterium | 96% | 92% | Coprococcus catus | 88% | 100% | Ascusb_374 | SEQ ID | 0.76214 |
| incertae sedis (Family) | YAB2006 | | | | | | | NO: 17 | |
| Anaeroplasma | Anaeroplasma | 97% | 100% | Anaeroplasma | 97% | 100% | Ascusb_411 | SEQ ID | 0.76213 |
| (Genus) | varium | | | varium | | | | NO: 18 | |
| Clostridium sensu | Clostridiales | 100% | 93% | Clostridium | 81% | 91% | Ascusb_546 | SEQ ID | 0.83869 |
| stricto (Genus) | bacterium | | | stercorarium | | | | NO: 19 | |
| Butyricicoccus | Clostridiales | 88% | 91% | Aminiphilus | 80% | 77% | Ascusb_672 | SEQ ID | 0.74829 |
| (Genus) | bacterium | | | circumscriptus | | | | NO: 20 | |
| Butyricicoccus | Clostridiales | 89% | 89% | Aminiphilus | 97% | 27% | Ascusb_765 | SEQ ID | 0.74111 |
| (Genus) | bacterium | | | circumscriptus | | | | NO: 21 | |
| Rikenella | Bacteroides sp. | 93% | 64% | Alistipes shahii | 93% | 64% | Ascusb_812 | SEQ ID | 0.73874 |
| (Genus) | | | | | | | | NO: 22 | |
| Tannerella | Alistipes shahii | 86% | 100% | Alistipes shahii | 86% | 100% | Ascusb_1295 | SEQ ID | 0.8365 |
| (Genus) | | | | | | | | NO: 23 | |
| Howardella | Clostridiales | 85% | 100% | Oscillibacter | 89% | 41% | Ascusb_1763 | SEQ ID | 0.75083 |
| (Genus) | bacterium | | | valericigenes | | | | NO: 24 | |
| Prevotella | Bacteroidetes | 97% | 95% | Odoribacter | 77% | 86% | Ascusb_1780 | SEQ ID | 0.89749 |
| (Genus) | bacterium | | | splanchnicus | | | | NO: 25 | |
| Butyricimonas | Bacteroidetes | 95% | 99% | Tannerella forsythia | 83% | 92% | Ascusb_1801 | SEQ ID | 0.89664 |
| (Genus) | bacterium | | | | | | | NO: 26 | |
| Clostridium sensu | Bacterium | 96% | 93% | Hydrogenoanaero- | 84% | 86% | Ascusb_1833 | SEQ ID | 0.73989 |
| | | | | bacterium | | | | | |
| stricto (Genus) | XBB3002 | | | saccharovorans | | | | NO: 27 | |
| Clostridium sensu | Clostridium | 98% | 100% | Clostridium | 98% | 100% | Ascusb_3138 | SEQ ID | 0.76524 |
| stricto (Genus) | butyricum | | | butyricum | | | | NO: 28 | |
| Saccharofermentans | Rumen bacterium | 87% | 99% | Faecalibacterium | 90% | 76% | Ascusb_6589 | SEQ ID | 0.76539 |
| (Genus) | NK4A214 | | | prausnitzii | | | | NO: 29 | |
| Lachnospiraceae | Roseburia | 90% | 100% | Roseburia | 90% | 100% | Ascusb_7921 | SEQ ID | 0.86201 |
| incertae sedis (Family) | intestinalis | | | intestinalis | | | | NO: 30 | |
| Succinivibrio | Succinivibrio | 95% | 99% | Succinivibrio | 95% | 99% | Ascusb_11 | SEQ ID | 0.50001 |
| (Genus) | dextrinosolvens | | | dextrinosolvens | | | | NO: 2045 | |
| Prevotella | Bacterium | 100% | 93% | Prevotella | 91% | | Ascusb_36 | SEQ ID | 0.55431 |
| (Genus) | MB2027 | | | ruminicola | | | | NO: 2046 | |
| Prevotella | Prevotella | 100% | 99% | Prevotella | 100% | | Ascusb_67 | SEQ ID | 0.49156 |
| (Genus) | ruminicola | | | ruminicola | | | | NO: 2047 | |
| Prevotella | Prevotella | 97% | 100% | Prevotella | 97% | 100% | Ascusb_87 | SEQ ID | 0.59635 |
| (Genus) | ruminicola | | | ruminicola | | | | NO: 2048 | |
| Ruminobacter | Ruminobacter sp. | 92% | 99% | Ruminobacter | 92% | 100% | Ascusb_101 | SEQ ID | 0.75099 |
| (Genus) | | | | amylophilus | | | | NO: 2049 | |
| Syntrophococcus | Blautia producta | 91% | 100% | Blautia producta | 91% | 100% | Ascusb_104 | SEQ ID | 0.70044 |
| (Genus) | | | | | | | | NO: 2050 | |
| Succinivibrio | Succinivibrio | 96% | 99% | Succinivibrio | 96% | 99% | Ascusb_125 | SEQ ID | 0.44408 |
| (Genus) | dextrinosolvens | | | dextrinosolvens | | | | NO: 2051 | |
| Pseudobutyrivibrio | Butyrivibrio | 99% | 100% | Butyrivibrio | 99% | 100% | Ascusb_149 | SEQ ID | 0.50676 |
| (Genus) | fibrisolvens | | | fibrisolvens | | | | NO: 2052 | |
| Prevotella | Prevotella | 99% | 99% | Prevotella | 99% | 99% | Ascusb_159 | SEQ ID | 0.5744 |
| (Genus) | ruminicola | | | ruminicola | | | | NO: 2053 | |
| Prevotella | Prevotella | 96% | 99% | Prevotella | 96% | 99% | Ascusb_183 | SEQ ID | 0.50204 |
| (Genus) | ruminicola | | | ruminicola | | | | NO: 2054 | |
| Prevotella | Prevotella | 99% | 100% | Prevotella | 99% | 100% | Ascusb_187 | SEQ ID | 0.56688 |
| (Genus) | ruminicola | | | ruminicola | | | | NO: 2055 | |
| Prevotella | Bacterium XBB2006 | 100% | 94% | Prevotella albensis | 87% | 97% | Ascusb_190 | SEQ ID | 0.56183 |
| (Genus) | | | | | | | | NO: 2056 | |
| Lachnospiraceae | Lachnospiraceae | 91% | 100% | Roseburia | 89% | 100% | Ascusb_199 | SEQ ID | 0.62487 |
| incertae sedis (Family) | bacterium | | | inulinivorans | | | | NO: 2057 | |
| Syntrophococcus | Ruminococcus | 95% | 100% | Ruminococcus | 95% | 100% | Ascusb_278 | SEQ ID | 0.51235 |
| (Genus) | gnavus | | | gnavus | | | | NO: 2058 | |
| Ruminobacter | Ruminobacter sp. | 100% | 99% | Ruminobacter | 99% | 100% | Ascusb_329 | SEQ ID | 0.4754 |
| (Genus) | | | | amylophilus | | | | NO: 2059 | |
| Butyrivibrio | Butyrivibrio sp. | 100% | 100% | Butyrivibrio | 99% | 98% | Ascusb_368 | SEQ ID | 0.60727 |
| (Genus) | | | | hungatei | | | | NO: 2060 | |
| Clostridium_XlVa | Eubacterium | 100% | 96% | Eubacterium | 100% | 96% | Ascusb_469 | SEQ ID | 0.66345 |
| (Cluster) | oxidoreducens | | | oxidoreducens | | | | NO: 2061 | |
| Prevotella | Rumen bacterium | 99% | 99% | Prevotella brevis | 91% | 100% | Ascusb_530 | SEQ ID | 0.44804 |
| (Genus) | NK4A111 | | | | | | | NO: 2062 | |
| Prevotella | Prevotella sp. | 100% | 93% | Prevotella copri | 100% | 93% | Ascusb_728 | SEQ ID | 0.55431 |
| (Genus) | | | | | | | | NO: 2063 | |
| Lachnospiraceae | Eubacterium | 99% | 100% | Eubacterium | 99% | 100% | Ascusb_756 | SEQ ID | 0.72136 |
| incertae sedis (Family) | ruminantium | | | ruminantium | | | | NO: 2064 | |
| Roseburia | Lachnospiraceae | 89% | 93% | [Clostridium] | 89% | 91% | Ascusb_810 | SEQ ID | 0.65527 |
| (Genus) | bacterium | | | xylanovorans | | | | NO: 2065 | |
| Lachnospiraceae | Lachnospira | 99% | 100% | Lachnospira | 99% | 100% | Ascusb_817 | SEQ ID | 0.46512 |
| incertae sedis (Family) | pectinoschiza | | | pectinoschiza | | | | NO: 2066 | |
| Butyrivibrio | Butyrivibrio | 98% | 99% | Butyrivibrio | 98% | 99% | Ascusb_826 | SEQ ID | 0.65357 |
| (Genus) | fibrisolvens | | | fibrisolvens | | | | NO: 2067 | |
| Pseudobutyrivibrio | Pseudobutyrivibrio | 100% | 95% | Pseudobutyrivibrio | 97% | 100% | Ascusb_880 | SEQ ID | 0.52295 |
| (Genus) | sp. | | | ruminis | | | | NO: 2068 | |
| Turicibacter | Sinimarinibacterium | 87% | 69% | Sinimarinibacterium | 87% | 69% | Ascusb_913 | SEQ ID | 0.55141 |
| (Genus) | flocculans | | | flocculans | | | | NO: 2069 | |
| Lachnospiraceae | Bacterium | 100% | 91% | Butyrivibrio | 90% | 100% | Ascusb_974 | SEQ ID | 0.53487 |
| incertae sedis (Family) | FB3002 | | | fibrisolvens | | | | NO: 2070 | |
| Pseudobutyrivibrio | Pseudobutyrivibrio | 97% | 99% | Pseudobutyrivibrio | 97% | 99% | Ascusb_1069 | SEQ ID | 0.55299 |
| (Genus) | ruminis | | | ruminis | | | | NO: 2071 | |
| Anaerolinea | Chloroflexi | 88% | 99% | Anaerolinea | 90% | 57% | Ascusb_1074 | SEQ ID | 0.50893 |
| (Genus) | bacterium | | | thermophila | | | | NO: 2072 | |
| Roseburia | Lachnospiraceae | 98% | 99% | Eubacterium rectale | 94% | 100% | Ascusb_1293 | SEQ ID | 0.61745 |
| (Genus) | | | | | | | | NO: 2073 | |
| Propionibacterium | Propionibacterium | 100% | 100% | Propionibacterium | 100% | 100% | Ascusb_1367 | SEQ ID | 0.54046 |
| (Genus) | acnes | | | acnes | | | | NO: 2074 | |
| Clostridium_XIVa | Lachnospiraceae | 88% | 100% | Pseudobutyrivibrio | 86% | 97% | Ascusb_1632 | SEQ ID | 0.46826 |
| (Cluster) | bacterium | | | ruminis | | | | NO: 2075 | |
| Olsenella | Coriobacteriaceae | 98% | 100% | Olsenella profusa | 97% | 100% | Ascusb_1674 | SEQ ID | 0.51533 |
| (Genus) | bacterium | | | | | | | NO: 2076 | |
| Streptococcus | Streptococcus | 95% | 82% | Streptococcus | 95% | 82% | Ascusb_1786 | SEQ ID | 0.48678 |
| (Genus) | dentirousetti | | | dentirousetti | | | | NO: 2077 | |
| Clostridium_XlVa | Butyrivibrio sp. | 99% | 96% | Butyrivibrio | 93% | 100% | Ascusb_1812 | SEQ ID | 0.64367 |
| (Cluster) | | | | proteoclasticus | | | | NO: 2078 | |
| Clostridium_XlVa | Bacterium | 99% | 91% | Butyrivibrio | 96% | 99% | Ascusb_1850 | SEQ ID | 0.57807 |
| (Cluster) | DAZ2002 | | | hungatei | | | | NO: 2079 | |
| Roseburia | Lachnospiraceae | 95% | 99% | Eubacterium | 89% | 100% | Ascusb_1879 | SEQ ID | 0.45014 |
| (Genus) | bacterium | | | oxidoreducens | | | | NO: 2080 | |
| Clostridium_IV | Ruminococcaceae | 87% | 99% | Ruminococcus | 85% | 91% | Ascusb_2090 | SEQ ID | 0.75266 |
| (Cluster) | bacterium | | | bromii | | | | NO: 2081 | |
| Clostridium_XICa | Bacterium | 99% | 99% | Clostridium | 85% | 90% | Ascusb_2124 | SEQ ID | 0.4673 |
| (Cluster) | MA2020 | | | algidixylanolyticum | | | | NO: 2082 | |
| Lachnospiracea | Bacterium | 94% | 94% | Eubacterium | 91% | 100% | Ascusb_2198 | SEQ ID | 0.55249 |
| incertae sedis (Family) | YSB2008 | | | ruminantium | | | | NO: 2083 | |
| Erysipelotrichaceae | Catenisphaera | 90% | 91% | Catenisphaera | 90% | 91% | Ascusb_2511 | SEQ ID | 0.50619 |
| incertae sedis (Family) | adipataccumulans | | | adipataccumulans | | | | NO: 2084 | |
| Solobacterium | Erysipelotrichaceae | 92% | 99% | Solobacterium | 91% | 100% | Ascusb_2530 | SEQ ID | 0.53735 |
| (Genus) | bacterium | | | moorei | | | | NO: 2085 | |
| Lachnospiraceae | Eubacterium | 95% | 100% | Eubacterium | 95% | 100% | Ascusb_2597 | SEQ ID | 0.52028 |
| incertae sedis (Genus) | ruminantium | | | ruminantium | | | | NO: 2086 | |
| Clostridium_XlVa | Butyrivibrio | 99% | 100% | Butyrivibrio | 99% | 100% | Ascusb_2624 | SEQ ID | 0.55465 |
| (Cluster) | proteoclasticus | | | proteoclasticus | | | | NO: 2087 | |
| Ralstonia | Ralstonia sp. 94 | 100% | 99% | Ralsonia insidiosa | 99% | 100% | Ascusb_2667 | SEQ ID | 0.52371 |
| (Genus) | | | | | | | | NO: 2088 | |
| Clostridium_XlVa | Butyrivibrio sp. | 97% | 94% | Butyrivibrio | 95% | 100% | Ascusb_2836 | SEQ ID | 0.43374 |
| (Cluster) | | | | proteoclasticus | | | | NO: 2089 | |
| Eubacterium | Eubacteriaceae | 84% | 100% | Casaltella | 87% | 82% | Ascusb_3003 | SEQ ID | 0.56301 |
| (Genus) | bacterium | | | massiliensis | | | | NO: 2090 | |
| Lachnobacterium | Rumen bacterium | 89% | 98% | Eubacterium | 90% | 91% | Ascusb_3504 | SEQ ID | 0.52856 |
| (Genus) | | | | xylanophilum | | | | NO: 2091 | |
| Acholeplasma | Acholeplasma | 86% | 72% | Acholeplasma | 86% | 72% | Ascusb_3881 | SEQ ID | 0.4402 |
| (Genus) | brassicae | | | brassicae | | | | NO: 2092 | |
| Selenomonas | Mitsuokella | 91% | 97% | Mitsuokella | 91% | 97% | Ascusb_4728 | SEQ ID | 0.4761 |
| (Genus) | jalaludinii | | | jalaludinii | | | | NO: 2093 | |
| Prevotella | Prevotella | 98% | 100% | Prevotella | 98% | 100% | Ascusb_4934 | SEQ ID | 0.56204 |
| (Genus) | ruminicola | | | ruminicola | | | | NO: 2094 | |
| Clostridium_XlVa | Butyrivibrio sp. | 99% | 99% | Butyrivibrio | 97% | 100% | Ascusb_4959 | SEQ ID | 0.42892 |
| (Cluster) | | | | fibrisolvens | | | | NO: 2095 | |
| Succinivibrio | Succinivibrio | 86% | 84% | Succinivibrio | 86% | 84% | Ascusb_5525 | SEQ ID | 0.51758 |
| (Genus) | dextrinosolvens | | | dextrinosolvens | | | | NO: 2096 | |
| Ruminobacter | Ruminobacter sp. | 100% | 99% | Ruminobacter | 99% | 100% | Ascusb_12103 | SEQ ID | 0.52909 |
| (Genus) | | | | amylophilus | | | | NO: 2097 | |
| Sharpea | Lachnospiraceae | 97% | 100% | Sharpea azabuensis | 100% | 91% | Ascusb_14245 | SEQ ID | 0.61391 |
| (Genus) | bacterium | | | | | | | NO: 2098 | |
| Prevotella | Prevotella | 87% | 97% | Prevotella | 87% | 97% | Ascusb_14945 | SEQ ID | 0.80101 |
| (Genus) | ruminicola | | | ruminicola | | | | NO: 2099 | |
| Prevotella | Prevotella sp. | 88% | 89% | Prevotella | 87% | 945 | Ascusb_17461 | SEQ ID | 0.44777 |
| (Genus) | DJF | | | ruminicola | | | | NO: 2100 | |
| Prevotella | Bacterium | 100% | 93% | Prevotella | 91% | 99% | Ascusb_20083 | SEQ ID | 0.52538 |
| (Genus) | MB2027 | | | ruminicola | | | | NO: 2101 | |
| Prevotella | Prevotella | 99% | 100% | Prevotella | 99% | 100% | Ascusb_20187 | SEQ ID | 0.59156 |
| (Genus) | ruminicola | | | ruminicola | | | | NO: 2102 | |
| Prevotella | Prevotella | 100% | 100% | Prevotella | 100% | 100% | Ascusb_20539 | SEQ ID | 0.4912 |
| (Genus) | ruminicola | | | ruminicola | | | | NO: 2103 | |
| Piromyces | Piromyces sp. | 93% | 100% | Neocallimastix | 84% | 100% | Ascusf_11 | SEQ ID | 0.81719 |
| (Genus) | | | | frontalis | | | | NO: 31 | |
| Candida xylopsoc | Pichia kudriavzevii | 100% | 100% | Pichia kudriavzevii | 100% | 100% | Ascusf_15 | SEQ ID | 0.76088 |
| (Genus + Species) | | | | | | | | NO: 32 | |
| Orpinomyces | Orpinomyces sp. | 100% | 100% | Neocallimastix | 86% | 100% | Ascusf_22 | SEQ ID | 0.76806 |
| (Genus) | | | | frontalis | | | | NO: 33 | |
| Orpinomycs | Neocallimastix | 86% | 80% | Neocallimastix | 86% | 80% | Ascusf_23 | SEQ ID | 0.85707 |
| (Genus) | frontalis | | | frontalis | | | | NO: 34 | |
| Orpinomyces | Orpinomyces sp. | 95% | 100% | Neocallimastix | 86% | 100% | Ascusf_24 | SEQ ID | 0.85292 |
| (Genus) | | | | frontalis | | | | NO: 35 | |
| Candida apicol | Candida apicola | 100% | 100% | Candida apicola | 100% | 100% | Ascusf_25 | SEQ ID | 0.70561 |
| (Genus + Species) | | | | | | | | NO: 36 | |
| Candida rugosa | Candida | 100% | 100% | Candida | 100% | 100% | Ascusf_38 | SEQ ID | 0.78246 |
| (Genus + Species) | akabanensis | | | akabanensis | | | | NO: 37 | |
| Neocallimastix | Neocallimastix sp. | 99% | 100% | Neocallimastix | 99% | 100% | Ascusf_45 | SEQ ID | 0.86185 |
| (Genus) | | | | frontalis | | | | NO: 38 | |
| Orpinomyces | Orpinomyces sp. | 99% | 100% | Orpinomyces | 96% | 96% | Ascusf_60 | SEQ ID | 0.72985 |
| (Genus) | | | | joyonii | | | | NO: 39 | |
| Orpinomyces | Neocallimastix | 86% | 78% | Neocallimastix | 86% | 78% | Ascusf_73 | SEQ ID | 0.76064 |
| (Genus) | frontalis | | | frontalis | | | | NO: 40 | |
| Neocallimastix | Neocallimastix sp. | 98% | 100% | Neocallimastix | 93% | 100% | Ascusf_77 | SEQ ID | 0.83475 |
| (Genus) | | | | frontalis | | | | NO: 41 | |
| Neocallimastix | Neocallimastix | 97% | 100% | Neocallimastix | 97% | 100% | Ascusf_94 | SEQ ID | 0.77644 |
| (Genus) | frontalis | | | frontalis | | | | NO: 42 | |
| Ascomycota | Basidiomycota sp. | 85% | 98% | Sugiyamaella | 97% | 26% | Ascusf_95 | SEQ ID | 0.7089 |
| (Genus) | | | | lignohabitans | | | | NO: 43 | |
| Piromyces | Caecomyces sp. | 94% | 100% | Cyllamyces | 86% | 89% | Ascusf_108 | SEQ ID | 0.68405 |
| (Genus) | | | | aberensis | | | | NO: 44 | |
| Orpinomyces | Orpinomyces sp. | 95% | 100% | Orpinomyces | 87% | 96% | Ascusf_119 | SEQ ID | 0.80055 |
| (Genus) | | | | joyonii | | | | NO: 45 | |
| Cyllamyces | Caecomyces sp. | 90% | 100% | Caecomyces | 90% | 83% | Ascusf_127 | SEQ ID | 0.66812 |
| (Genus) | | | | communis | | | | NO: 46 | |
| Piromyces | Caecomyces sp. | 91% | 100% | Caecomyces | 92% | 83% | Ascusf_136 | SEQ ID | 0.73201 |
| (Genus) | | | | communis | | | | NO: 47 | |
| Cyllamyces | Cyllamyces sp. | 97% | 100% | Cyllamyces | 94% | 89% | Ascusf_193 | SEQ ID | 0.7586 |
| (Genus) | | | | aberensis | | | | NO: 48 | |
| Piromyces | Piromyces sp. | 92% | 100% | Neocallimastix | 84% | 100% | Ascusf_228 | SEQ ID | 0.83403 |
| (Genus) | | | | frontalis | | | | NO: 49 | |
| Piromyces | Caecomyces sp. | 94% | 100% | Cyllamyces | 86% | 89% | Ascusf_249 | SEQ ID | 0.78679 |
| (Genus) | | | | aberensis | | | | NO: 50 | |
| Neocallimastix | Neocallimastix sp. | 98% | 100% | Neocallimastix | 92% | 100% | Ascusf_307 | SEQ ID | 0.77859 |
| (Genus) | | | | frontalis | | | | NO: 51 | |
| Piromyces | Piromyces sp. | 94% | 100% | Neocallimastix | 83% | 100% | Ascusf_315 | SEQ ID | 0.81028 |
| (Genus) | | | | frontalis | | | | NO: 52 | |
| Neocallimastix | Neocallimastix sp. | 100% | 98% | Neocallimastix | 100% | 90% | Ascusf_334 | SEQ ID | 0.76456 |
| (Genus) | | | | frontalis | | | | NO: 53 | |
| Saccharomycetales | Candida ethanolica | 100% | 100% | Candida ethanolica | 100% | 100% | Ascusf_353 | SEQ ID | 0.82628 |
| (Order) | | | | | | | | NO: 54 | |
| Piromyces | Piromyces sp. | 91% | 100% | Neocallimastix | 83% | 100% | Ascusf_448 | SEQ ID | 0.70021 |
| (Genus) | | | | frontalis | | | | NO: 55 | |
| Orpinomyces | Neocallimastix sp. | 88% | 91% | Neocallimastix | 96% | 88% | Ascusf_786 | SEQ ID | 0.63201 |
| (Genus) | | | | frontalis | | | | NO: 56 | |
| Piromyces | Piromyces sp. | 91% | 100% | Neocallimastix | 83% | 100% | Ascusf_836 | SEQ ID | 0.65492 |
| (Genus) | | | | frontalis | | | | NO: 57 | |
| Phyllosticta | Tremellales sp. | 96% | 74% | Tremella giraffa | 83% | 96% | Ascusf_923 | SEQ ID | 0.76115 |
| capitalensis | | | | | | | | NO: 58 | |
| (Genus + Species) | | | | | | | | | |
| Orpinomyces | Neocallimastix | 87% | 77% | Neocallimastix | 87% | 77% | Ascusf_1020 | SEQ ID | 0.68043 |
| (Genus) | frontalis | | | frontalis | | | | NO: 59 | |
| Orpinomyces | Neocallimastix | 85% | 80% | Neocallimastix | 85% | 80% | Ascusf_1103 | SEQ ID | 0.73004 |
| (Genus) | frontalis | | | frontalis | | | | NO: 60 | |
| Orpinomyces | Fungal sp. | 99% | 100% | Orpinomyces | 94% | 96% | Ascusf_81 | SEQ ID | 0.44471 |
| (Genus) | Tianzhu-Yak6 | | | joyonii | | | | NO: 2104 | |
| Piromyces | Piromyces sp. | 99% | 100% | Neocallimastix | 84% | 100% | Ascusf_206 | SEQ ID | 0.49752 |
| (Genus) | | | | frontalis | | | | NO: 2105 | |
| Piromyces | Piromyces sp. | 96% | 100% | Neocallimastix | 82% | 100% | Ascusf_208 | SEQ ID | 0.4176 |
| (Genus) | | | | frontalis | | | | NO: 2106 | |
| Piromyces | Piromyces sp. | 99% | 100% | Neocallimastix | 82% | 100% | Ascusf_1012 | SEQ ID | 0.55922 |
| (Genus) | | | | frontalis | | | | NO: 2107 | |

TABLE 2
Microbial Deposits Corresponding to the Microbes of Table 1

| Predicted Taxa | | | | Predicted Taxa | | | |
|---|---|---|---|---|---|---|---|
| of Isolated | Strain | Sequence | | of Isolated | Strain | Sequence | |
| Microbes | Designation | Identifier | Deposit No. | Microbes | Designation | Identifier | Deposit No. |
| Ruminococcus | Ascusb_5 | SEQ ID | PATENT201612001, | Streptococcus | Ascusb_1786 | SEQ ID | PATENT201612011, |
| bovis sp. nov. | (consortia) | NO: 1 | PATENT201612007, | (Genus) | | NO: 2077 | PATENT201612012, |
| (Species - Not | | | PATENT201612009, | | | | PATENT201612013 |
| predicted, rather a | | | PATENT201612010, | | | | |
| new species) | | | PATENT201612011, | | | | |
| | | | PATENT201612012 | | | | |
| Ruminococcus | Ascusb_5 | SEQ ID | PTA-125917¹ | Clostridium_XlVa | Ascusb_1812 | SEQ ID | PATENT201612011, |
| bovis sp. nov. | (pure | NO: 2108 | TSD-225² | (Cluster) | | NO: 2078 | PATENT201612012 |
| (Species - Not | culture) | | NARRL B-67764³ | | | | |
| predicted, rather a | | | NCTC 14479⁴ | | | | |
| new species) | | | | | | | |
| Ruminococcus | Ascusb_7 | SEQ ID | PATENT201612005, | Clostridium_XlVa | Ascusb_1850 | SEQ ID | PATENT201612013 |
| (Genus) | | NO: 2 | PATENT201612007, | (Cluster) | | NO: 2079 | |
| | | | PATENT201612009, | | | | |
| | | | PATENT201612010, | | | | |
| | | | PATENT201612011, | | | | |
| | | | PATENT201612012, | | | | |
| | | | PATENT201612013 | | | | |
| Clostridium IV | Ascusb_26 | SEQ ID | PATENT201612005, | Roseburia | Ascusb_1879 | SEQ ID | |
| (Cluster) | | NO: 3 | PATENT201612009, | (Genus) | | NO: 2080 | |
| | | | PATENT201612011, | | | | |
| | | | PATENT201612012 | | | | |
| Roseburia | Ascusb_27 | SEQ ID | PATENT201612009 | Clostridium_IV | Ascusb_2090 | SEQ ID | PATENT201612007, |
| (Genus) | | NO: 4 | | (Cluster) | | NO: 2081 | PATENT201612009 |
| Hydrogenoanaero- | Ascusb_32 | SEQ ID | PATENT201612006, | Clostridium_XICa | Ascusb_2124 | SEQ ID | PATENT201612012 |
| bacterium (Genus) | | NO: 5 | PATENT201612009, | (Cluster) | | NO: 2082 | |
| | | | PATENT201612012 | | | | |
| Clostridium XIVa | Ascusb_79 | SEQ ID | PATENT201612011, | Lachnospiracea | Ascusb_2198 | SEQ ID | PATENT201612012 |
| (Cluster) | | NO: 6 | PATENT201612012 | incertae sedis | | NO: 2083 | |
| | | | | (Family) | | | |
| Saccharofermentans | Ascusb_82 | SEQ ID | PATENT201612005, | Erysipelotrichaceae | Ascusb_2511 | SEQ ID | PATENT201612001, |
| (Genus) | | NO: 7 | PATENT201612006, | incertae sedis | | NO: 2084 | PATENT201612007, |
| | | | PATENT201612007, | (Family) | | | PATENT201612009 |
| | | | PATENT201612009, | | | | |
| | | | PATENT201612010, | | | | |
| | | | PATENT201612012 | | | | |
| Saccharofermentans | Ascusb_102 | SEQ ID | PATENT201612005, | Solobacterium | Ascusb_2530 | SEQ ID | PATENT201612011, |
| (Genus) | | NO: 8 | PATENT201612007, | (Genus) | | NO: 2085 | PATENT201612012 |
| | | | PATENT201612010, | | | | |
| | | | PATENT201612011, | | | | |
| | | | PATENT201612012 | | | | |
| Butyricicoccus | Ascusb_89 | SEQ ID | PATENT201612011, | Lachnospiraceae | Ascusb_2597 | SEQ ID | PATENT201612013 |
| (Genus) | | NO: 9 | PATENT201612012 | incertae sedis | | NO: 2086 | |
| | | | | (Genus) | | | |
| Papillibacter | Ascusb_111 | SEQ ID | PATENT201612005, | Clostridium_XlVa | Ascusb_2624 | SEQ ID | PATENT201612009, |
| (Genus) | | NO: 10 | PATENT201612007, | (Cluster) | | NO: 2087 | PATENT201612011, |
| | | | PATENT201612012 | | | | PATENT201612012 |
| Ruminococcus | Ascusb_119 | SEQ ID | PATENT201612011, | Ralstonia | Ascusb_2667 | SEQ ID | PATENT201612013 |
| (Genus) | | NO: 11 | PATENT201612012 | (Genus) | | NO: 2088 | |
| Hydrogenoanaero- | Ascusb_145 | SEQ ID | PATENT201612011, | Clostridium_XlVa | Ascusb_2836 | SEQ ID | PATENT201612013 |
| bacterium (Genus) | | NO: 12 | PATENT201612012 | (Cluster) | | NO: 2089 | |
| Pelotomaculum | Ascusb_205 | SEQ ID | PATENT201612005, | Eubacterium | Ascusb_3003 | SEQ ID | PATENT201612009 |
| (Genus) | | NO: 13 | PATENT201612006, | (Genus) | | NO: 2090 | |
| | | | PATENT201612011, | | | | |
| | | | PATENT201612012 | | | | |
| Saccharofermentans | Ascusb_232 | SEQ ID | PATENT201612010, | Lachnobacterium | Ascusb_3504 | SEQ ID | PATENT201612011, |
| (Genus) | | NO: 14 | PATENT201612011, | (Genus) | | NO: 2091 | PATENT201612012 |
| | | | PATENT201612012 | | | | |
| Lachnospiraceae | Ascusb_252 | SEQ ID | | Acholeplasma | Ascusb_3881 | SEQ ID | PATENT201612007 |
| incertae sedis | | NO: 15 | | (Genus) | | NO: 2092 | |
| (Family) | | | | | | | |
| Butyricicoccus | Ascusb_268 | SEQ ID | PATENT201612007, | Selenomonas | Ascusb_4728 | SEQ ID | |
| sensu stricto | | NO: 16 | PATENT201612011, | (Genus) | | NO: 2093 | |
| (Genus) | | | PATENT201612012 | | | | |
| Lachnospiraceae | Ascusb_374 | SEQ ID | PATENT201612007, | Prevotella | Ascusb_4934 | SEQ ID | |
| incertae sedis | | NO: 17 | PATENT201612009, | (Genus) | | NO: 2094 | |
| (Family) | | | PATENT201612010, | | | | |
| | | | PATENT201612011 | | | | |
| | | | PATENT201612012 | | | | |
| Anaeroplasma | Ascusb_411 | SEQ ID | PATENT201612007, | Clostridium_XlVa | Ascusb_4959 | SEQ ID | |
| (Genus) | | NO: 18 | PATENT201612011, | (Cluster) | | NO: 2095 | |
| | | | PATENT201612012 | | | | |
| Clostridium sensu | Ascusb_546 | SEQ ID | PATENT201612013 | Succinivibrio | Ascusb_5525 | SEQ ID | |
| stricto (Genus) | | NO: 19 | | (Genus) | | NO: 2096 | |
| Butyricicoccus | Ascusb_672 | SEQ ID | | Ruminobacter | Ascusb_12103 | SEQ ID | PATENT201612001 |
| (Genus) | | NO: 20 | | (Genus) | | NO: 2097 | |
| Butyricicoccus | Ascusb_765 | SEQ ID | PATENT201612013 | Sharpea | Ascusb_14245 | SEQ ID | PATENT201612001, |
| (Genus) | | NO: 21 | | (Genus) | | NO: 2098 | PATENT201612008, |
| | | | | | | | PATENT201612009, |
| | | | | | | | PATENT201612011, |
| | | | | | | | PATENT201612012, |
| | | | | | | | PATENT201612013 |
| Rikenella | Ascusb_812 | SEQ ID | PATENT201612005, | Prevotella | Ascusb_14945 | SEQ ID | |
| (Genus) | | NO: 22 | PATENT201612006, | (Genus) | | NO: 2099 | |
| | | | PATENT201612011, | | | | |
| | | | PATENT201612012 | | | | |
| Tannerella | Ascusb_1295 | SEQ ID | PATENT201612007, | Prevotella | Ascusb_17461 | SEQ ID | |
| (Genus) | | NO: 23 | PATENT201612009, | (Genus) | | NO: 2100 | |
| | | | PATENT201612011, | | | | |
| | | | PATENT201612012 | | | | |
| Howardella | Ascusb_1763 | SEQ ID | PATENT201612011, | Prevotella | Ascusb_20083 | SEQ ID | PATENT201612006 |
| (Genus) | | NO: 24 | PATENT201612012 | (Genus) | | NO: 2101 | |
| Prevotella | Ascusb_1780 | SEQ ID | PATENT201612013 | Prevotella | Ascusb_20187 | SEQ ID | PATENT201612009, |
| (Genus) | | NO: 25 | | (Genus) | | NO: 2102 | PATENT201612011, |
| | | | | | | | PATENT201612012 |
| Butyricimonas | Ascusb_1801 | SEQ ID | PATENT201612005 | Prevotella | Ascusb_20539 | SEQ ID | |
| (Genus) | | NO: 26 | | (Genus) | | NO: 2103 | |
| Clostridium sensu | Ascusb_1833 | SEQ ID | PATENT201612006, | Piromyces | Ascusf_11 | SEQ ID | |
| stricto | | NO: 27 | PATENT201612007, | (Genus) | | NO: 31 | |
| (Genus) | | | PATENT201612009, | | | | |
| | | | PATENT201612010, | | | | |
| | | | PATENT201612011, | | | | |
| | | | PATENT201612012 | | | | |
| Clostridium sensu | Ascusb_3138 | SEQ ID | PATENT201612005, | Candida xylopsoc | Ascusf_15 | SEQ ID | NRRL Y-67249, |
| stricto | | NO: 28 | PATENT201612006, | (Genus + Species) | | NO: 32 | PATENT201612014 |
| (Genus) | | | PATENT201612008, | | | | |
| | | | PATENT201612009, | | | | |
| | | | PATENT201612010, | | | | |
| | | | PATENT201612011, | | | | |
| | | | PATENT201612012, | | | | |
| | | | PATENT201612013, | | | | |
| | | | NRRL B-67248 | | | | |
| Saccharofermentans | Ascusb_6589 | SEQ ID | PATENT201612005 | Orpinomyces | Ascusf_22 | SEQ ID | PATENT201612002, |
| (Genus) | | NO: 29 | | (Genus) | | NO: 33 | PATENT201612004 |
| Lachnospiraceae | Ascusb_7921 | SEQ ID | | Orpinomycs | Ascusf_23 | SEQ ID | PATENT201612014 |
| incertae sedis | | NO: 30 | | (Genus) | | NO: 34 | |
| (Family) | | | | | | | |
| Succinivibrio | Ascusb_11 | SEQ ID | PATENT201612001, | Orpinomyces | Ascusf_24 | SEQ ID | PATENT201612002, |
| (Genus) | | NO: 2045 | PATENT201612008, | (Genus) | | NO: 35 | PATENT201612004 |
| | | | PATENT201612009, | | | | |
| | | | PATENT201612011, | | | | |
| | | | PATENT201612012 | | | | |
| Prevotella | Ascusb_36 | SEQ ID | PATENT201612013 | Candida apicol | Ascusf_25 | SEQ ID | PATENT201612014 |
| (Genus) | | NO: 2046 | | (Genus + Species) | | NO: 36 | |
| Prevotella | Ascusb_67 | SEQ ID | | Candida rugosa | Ascusf_38 | SEQ ID | PATENT201612004 |
| (Genus) | | NO: 2047 | | (Genus + Species) | | NO: 37 | |
| Prevotella | Ascusb_87 | SEQ ID | | Neocallimastix | Ascusf_45 | SEQ ID | PATENT201612002, |
| (Genus) | | NO: 2048 | | (Genus) | | NO: 38 | PATENT201612014 |
| Ruminobacter | Ascusb_101 | SEQ ID | PATENT201612001, | Orpinomyces | Ascusf_60 | SEQ ID | |
| (Genus) | | NO: 2049 | PATENT201612005, | (Genus) | | NO: 39 | |
| | | | PATENT201612011, | | | | |
| | | | PATENT201612012 | | | | |
| Syntrophococcus | Ascusb_104 | SEQ ID | PATENT201612005, | Orpinomyces | Ascusf_73 | SEQ ID | |
| (Genus) | | NO: 2050 | PATENT201612006 | (Genus) | | NO: 40 | |
| Succinivibrio | Ascusb_125 | SEQ ID | PATENT201612001, | Neocallimastix | Ascusf_77 | SEQ ID | PATENT201612014 |
| (Genus) | | NO: 2051 | PATENT201612005, | (Genus) | | NO: 41 | |
| | | | PATENT201612006, | | | | |
| | | | PATENT201612008, | | | | |
| | | | PATENT201612009, | | | | |
| | | | PATENT201612011, | | | | |
| | | | PATENT201612012 | | | | |
| Pseudobutyrivibrio | Ascusb_149 | SEQ ID | PATENT201612001, | Neocallimastix | Ascusf_94 | SEQ ID | PATENT201612014 |
| (Genus) | | NO: 2052 | PATENT201612008, | (Genus) | | NO: 42 | |
| | | | PATENT201612009, | | | | |
| | | | PATENT201612011, | | | | |
| | | | PATENT201612012, | | | | |
| | | | PATENT201612013 | | | | |
| Prevotella | Ascusb_159 | SEQ ID | PATENT201612005, | Ascomycota | Ascusf_95 | SEQ ID | |
| (Genus) | | NO: 2053 | PATENT201612006, | (Genus) | | NO: 43 | |
| | | | PATENT201612007, | | | | |
| | | | PATENT201612008, | | | | |
| | | | PATENT201612009, | | | | |
| | | | PATENT201612010, | | | | |
| | | | PATENT201612011, | | | | |
| | | | PATENT201612012 | | | | |
| Prevotella | Ascusb_183 | SEQ ID | PATENT201612008, | Piromyces | Ascusf_108 | SEQ ID | PATENT201612014 |
| (Genus) | | NO: 2054 | PATENT201612009 | (Genus) | | NO: 44 | |
| Prevotella | Ascusb_187 | SEQ ID | PATENT201612007, | Orpinomyces | Ascusf_119 | SEQ ID | |
| (Genus) | | NO: 2055 | PATENT201612008, | (Genus) | | NO: 45 | |
| | | | PATENT201612010, | | | | |
| | | | PATENT201612011, | | | | |
| | | | PATENT201612012 | | | | |
| Prevotella | Ascusb_190 | SEQ ID | PATENT201612005, | Cyllamyces | Ascusf_127 | SEQ ID | |
| (Genus) | | NO: 2056 | PATENT201612006, | (Genus) | | NO: 46 | |
| | | | PATENT201612007, | | | | |
| | | | PATENT201612012 | | | | |
| Lachnospiraceae | Ascusb_199 | SEQ ID | PATENT201612011, | Piromyces | Ascusf_136 | SEQ ID | |
| incertae sedis | | NO: 2057 | PATENT201612012 | (Genus) | | NO: 47 | |
| (Family) | | | | | | | |
| Syntrophococcus | Ascusb_278 | SEQ ID | PATENT201612008 | Cyllamyces | Ascusf_193 | SEQ ID | |
| (Genus) | | NO: 2058 | | (Genus) | | NO: 48 | |
| Ruminobacter | Ascusb_329 | SEQ ID | PATENT201612010 | Piromyces | Ascusf_228 | SEQ ID | |
| (Genus) | | NO: 2059 | | (Genus) | | NO: 49 | |
| Butyrivibrio | Ascusb_368 | SEQ ID | PATENT201612011, | Piromyces | Ascusf_249 | SEQ ID | |
| (Genus) | | NO: 2060 | PATENT201612012 | (Genus) | | NO: 50 | |
| Clostridium_XlVa | Ascusb_469 | SEQ ID | | Neocallimastix | Ascusf_307 | SEQ ID | PATENT201612002, |
| (Cluster) | | NO: 2061 | | (Genus) | | NO: 51 | PATENT201612014 |
| Prevotella | Ascusb_530 | SEQ ID | | Piromyces | Ascusf_315 | SEQ ID | |
| (Genus) | | NO: 2062 | | (Genus) | | NO: 52 | |
| Prevotella | Ascusb_728 | SEQ ID | PATENT201612008, | Neocallimastix | Ascusf_334 | SEQ ID | PATENT201612014 |
| (Genus) | | NO: 2063 | PATENT201612009, | (Genus) | | NO: 53 | |
| | | | PATENT201612011, | | | | |
| | | | PATENT201612012, | | | | |
| | | | PATENT201612013 | | | | |
| Lachnospiraceae | Ascusb_756 | SEQ ID | | Saccharomycetales | Ascusf_353 | SEQ ID | PATENT201612014 |
| incertae sedis | | NO: 2064 | | (Order) | | NO: 54 | |
| (Family) | | | | | | | |
| Roseburia | Ascusb_810 | SEQ ID | PATENT201612011, | Piromyces | Ascusf_448 | SEQ ID | |
| (Genus) | | NO: 2065 | PATENT201612012 | (Genus) | | NO: 55 | |
| Lachnospiraceae | Ascusb_817 | SEQ ID | PATENT201612001, | Orpinomyces | Ascusf_786 | SEQ ID | |
| incertae sedis | | NO: 2066 | PATENT201612006, | (Genus) | | NO: 56 | |
| (Family) | | | PATENT201612009, | | | | |
| | | | PATENT201612012, | | | | |
| | | | PATENT201612013, | | | | |
| | | | NRRL B-67349 | | | | |
| Butyrivibrio | Ascusb_826 | SEQ ID | PATENT201612011, | Piromyces | Ascusf_836 | SEQ ID | |
| (Genus) | | NO: 2067 | PATENT201612012, | (Genus) | | NO: 57 | |
| | | | PATENT201612013, | | | | |
| | | | NRRL B-67347 | | | | |
| Pseudobutyrivibrio | Ascusb_880 | SEQ ID | PATENT201612008, | Phyllosticta | Ascusf_923 | SEQ ID | |
| (Genus) | | NO: 2068 | PATENT201612009 | capitalensis | | NO: 58 | |
| | | | | (Genus + Species) | | | |
| Turicibacter | Ascusb_913 | SEQ ID | PATENT201612007, | Orpinomyces | Ascusf_1020 | SEQ ID | |
| (Genus) | | NO: 2069 | PATENT201612008, | (Genus) | | NO: 59 | |
| | | | PATENT201612009, | | | | |
| | | | PATENT201612010, | | | | |
| | | | PATENT201612011, | | | | |
| | | | PATENT201612012 | | | | |
| Lachnospiraceae | Ascusb_974 | SEQ ID | PATENT201612013 | Orpinomyces | Ascusf_1103 | SEQ ID | |
| incertae sedis | | NO: 2070 | | (Genus) | | NO: 60 | |
| (Family) | | | | | | | |
| Pseudobutyrivibrio | Ascusb_1069 | SEQ ID | PATENT201612011, | Orpinomyces | Ascusf_81 | SEQ ID | |
| (Genus) | | NO: 2071 | PATENT201612012, | (Genus) | | NO: 2104 | |
| | | | NRRL B-67348 | | | | |
| Anaerolinea | Ascusb_1074 | SEQ ID | PATENT201612005, | Piromyces | Ascusf_206 | SEQ ID | PATENT201612003 |
| (Genus) | | NO: 2072 | PATENT201612007, | (Genus) | | NO: 2105 | |
| | | | PATENT201612008, | | | | |
| | | | PATENT201612012 | | | | |
| Roseburia | Ascusb_1293 | SEQ ID | | Piromyces | Ascusf_208 | SEQ ID | PATENT201612003 |
| (Genus) | | NO: 2073 | | (Genus) | | NO: 2106 | |
| Propionibacterium | Ascusb_1367 | SEQ ID | PATENT201612007, | Piromyces | Ascusf_1012 | SEQ ID | PATENT201612003 |
| (Genus) | | NO: 2074 | PATENT201612009, | (Genus) | | NO: 2107 | |
| | | | PATENT201612012 | | | | |
| Clostridium_XIVa | Ascusb_1632 | SEQ ID | PATENT201612011, | | | | |
| (Cluster) | | NO: 2075 | PATENT201612012 | | | | |
| Olsenella | Ascusb_1674 | SEQ ID | PATENT201612001, | | | | |
| (Genus) | | NO: 2076 | PATENT201612009 | | | | |

¹Deposit number applicable to Budapest treaty and/or type stain rules and procedures
²Deposit number applicable to Budapest treaty and/or type stain rules and procedures
³Deposit number applicable to Budapest treaty and/or type stain rules and procedures
⁴Deposit number applicable to Budapest treaty and/or type stain rules and procedures

TABLE 3
Bacteria of the present disclosure.

| Predicted Closest | | |
|---|---|---|
| Taxa of Isolated | Strain | Sequence |
| Microbes | Designation | Identifier |
| Corynebacterium | Ascusb_3 | 61 |
| Prevotella | Ascusb_50 | 62 |
| Comamonas | Ascusb_90 | 63 |
| Clostridium_XlVa | Ascusb_117 | 64 |
| Hippea | Ascusb_171 | 65 |
| Anaerovorax | Ascusb_177 | 66 |
| Clostridium_XlVa | Ascusb_179 | 67 |
| Rummeliibacillus | Ascusb_224 | 68 |
| Clostridium_XlVa | Ascusb_234 | 69 |
| Lachnospiracea_incertae_sedis | Ascusb_274 | 70 |
| Prevotella | Ascusb_276 | 71 |
| Anaerovorax | Ascusb_293 | 72 |
| Pseudoflavonifractor | Ascusb_327 | 73 |
| Prevotella | Ascusb_337 | 74 |
| Clostridium_XlVa | Ascusb_357 | 75 |
| Clostridium_XlVa | Ascusb_357 | 76 |
| Coprococcus | Ascusb_361 | 77 |
| Pyramidobacter | Ascusb_388 | 78 |
| Syntrophococcus | Ascusb_425 | 79 |
| Prevotella | Ascusb_444 | 80 |
| Clostridium_XlVa | Ascusb_456 | 81 |
| Prevotella | Ascusb_492 | 82 |
| Roseburia | Ascusb_523 | 83 |
| Clostridium_XlVa | Ascusb_526 | 84 |
| Lachnospiracea_incertae_sedis | Ascusb_570 | 85 |
| Clostridium_XlVa | Ascusb_584 | 86 |
| Acidothermus | Ascusb_605 | 87 |
| Adlercreutzia | Ascusb_606 | 88 |
| Prevotella | Ascusb_617 | 89 |
| Lachnospiracea_incertae_sedis | Ascusb_635 | 90 |
| Proteiniclasticum | Ascusb_642 | 91 |
| Lachnospiracea_incertae_sedis | Ascusb_647 | 92 |
| Anaerovorax | Ascusb_656 | 93 |
| Prevotella | Ascusb_669 | 94 |
| Bacteroides | Ascusb_681 | 95 |
| Clostridium_III | Ascusb_704 | 96 |
| Prevotella | Ascusb_706 | 97 |
| Acinetobacter | Ascusb_717 | 98 |
| Erysipelothrix | Ascusb_752 | 99 |
| Bacteroides | Ascusb_790 | 100 |
| Clostridium_XlVa | Ascusb_797 | 101 |
| Butyrivibrio | Ascusb_802 | 102 |
| Eubacterium | Ascusb_805 | 103 |
| Prevotella | Ascusb_828 | 104 |
| Eubacterium | Ascusb_890 | 105 |
| Prevotella | Ascusb_909 | 106 |
| Lachnospiracea_incertae_sedis | Ascusb_924 | 107 |
| Coprococcus | Ascusb_955 | 108 |
| Prevotella | Ascusb_958 | 109 |
| Clostridium_XlVa | Ascusb_980 | 110 |
| Prevotella | Ascusb_982 | 111 |
| Catonella | Ascusb_990 | 112 |
| Methanobrevibacter | Ascusb_993 | 113 |
| Ruminococcus | Ascusb_1013 | 114 |
| Lachnospiracea_incertae_sedis | Ascusb_1021 | 115 |
| Coprococcus | Ascusb_1033 | 116 |
| Clostridium_XlVa | Ascusb_1090 | 117 |
| Lachnospiracea_incertae_sedis | Ascusb_1108 | 118 |
| Prevotella | Ascusb_1113 | 119 |
| Anaerovorax | Ascusb_1114 | 120 |
| Asteroleplasma | Ascusb_1116 | 121 |
| Clostridium_XlVa | Ascusb_1118 | 122 |
| Caulobacter | Ascusb_1123 | 123 |
| Lachnospiracea_incertae_sedis | Ascusb_1128 | 124 |
| Roseburia | Ascusb_1152 | 125 |
| Clostridium_XlVa | Ascusb_1166 | 126 |
| Acinetobacter | Ascusb_1170 | 127 |
| Bacteroides | Ascusb_1176 | 128 |
| Erysipelothrix | Ascusb_1182 | 129 |
| Coprococcus | Ascusb_1199 | 130 |
| Clostridium_XlVa | Ascusb_1201 | 131 |
| Bacteroides | Ascusb_1218 | 132 |
| Coprococcus | Ascusb_1239 | 133 |
| Anaerovorax | Ascusb_1269 | 134 |
| Pseudoflavonifractor | Ascusb_1296 | 135 |
| Pseudoflavonifractor | Ascusb_1296 | 136 |
| Prevotella | Ascusb_1298 | 137 |
| Lachnospiracea_incertae_sedis | Ascusb_1304 | 138 |
| Roseburia | Ascusb_1320 | 139 |
| Prevotella | Ascusb_1330 | 140 |
| Coprococcus | Ascusb_955 | 108 |
| Prevotella | Ascusb_958 | 109 |
| Clostridium_XlVa | Ascusb_980 | 110 |
| Prevotella | Ascusb_982 | 111 |
| Catonella | Ascusb_990 | 112 |
| Methanobrevibacter | Ascusb_993 | 113 |
| Ruminococcus | Ascusb_1013 | 114 |
| Lachnospiracea_incertae_sedis | Ascusb_1021 | 115 |
| Coprococcus | Ascusb_1033 | 116 |
| Clostridium_XlVa | Ascusb_1090 | 117 |
| Lachnospiracea_incertae_sedis | Ascusb_1108 | 118 |
| Prevotella | Ascusb_1113 | 119 |
| Anaerovorax | Ascusb_1114 | 120 |
| Asteroleplasma | Ascusb_1116 | 121 |
| Clostridium_XlVa | Ascusb_1118 | 122 |
| Caulobacter | Ascusb_1123 | 123 |
| Lachnospiracea_incertae_sedis | Ascusb_1128 | 124 |
| Roseburia | Ascusb_1152 | 125 |
| Clostridium_XlVa | Ascusb_1166 | 126 |
| Acinetobacter | Ascusb_1170 | 127 |
| Bacteroides | Ascusb_1176 | 128 |
| Erysipelothrix | Ascusb_1182 | 129 |
| Coprococcus | Ascusb_1199 | 130 |
| Clostridium_XlVa | Ascusb_1201 | 131 |
| Bacteroides | Ascusb_1218 | 132 |
| Coprococcus | Ascusb_1239 | 133 |
| Anaerovorax | Ascusb_1269 | 134 |
| Pseudoflavonifractor | Ascusb_1296 | 135 |
| Pseudoflavonifractor | Ascusb_1296 | 136 |
| Prevotella | Ascusb_1298 | 137 |
| Lachnospiracea_incertae_sedis | Ascusb_1304 | 138 |
| Roseburia | Ascusb_1320 | 139 |
| Prevotella | Ascusb_1330 | 140 |
| Ruminococcus | Ascusb_1336 | 141 |
| Atopobium | Ascusb_1341 | 142 |
| Eubacterium | Ascusb_1347 | 143 |
| Robinsoniella | Ascusb_1355 | 144 |
| Neisseria | Ascusb_1357 | 145 |
| Ruminococcus | Ascusb_1362 | 146 |
| Prevotella | Ascusb_1364 | 147 |
| Slackia | Ascusb_1389 | 148 |
| Prevotella | Ascusb_1400 | 149 |
| Clostridium_XlVa | Ascusb_1410 | 150 |
| Bacteroides | Ascusb_1417 | 151 |
| Anaerorhabdus | Ascusb_1426 | 152 |
| Bacteroides | Ascusb_1433 | 153 |
| Prevotella | Ascusb_1439 | 154 |
| Corynebacterium | Ascusb_1440 | 155 |
| Atopobium | Ascusb_1468 | 156 |
| Streptophyta | Ascusb_1473 | 157 |
| Prevotella | Ascusb_1485 | 158 |
| Roseburia | Ascusb_1490 | 159 |
| Prevotella | Ascusb_1492 | 160 |
| Prevotella | Ascusb_1528 | 161 |
| Eubacterium | Ascusb_1538 | 162 |
| Rhodocista | Ascusb_1543 | 163 |
| Prevotella | Ascusb_1546 | 164 |
| Clostridium_XlVa | Ascusb_1553 | 165 |
| Prevotella | Ascusb_1554 | 166 |
| Prevotella | Ascusb_1571 | 167 |
| Streptophyta | Ascusb_1578 | 168 |
| Ochrobactrum | Ascusb_1580 | 169 |
| Mogibacterium | Ascusb_1591 | 170 |
| Adlercreutzia | Ascusb_1600 | 171 |
| Prevotella | Ascusb_1609 | 172 |
| Riemerella | Ascusb_1627 | 173 |
| Prevotella | Ascusb_1640 | 174 |
| Roseburia | Ascusb_1645 | 175 |
| Slackia | Ascusb_1647 | 176 |
| Clostridium_IV | Ascusb_1656 | 177 |
| Syntrophococcus | Ascusb_1659 | 178 |
| Prevotella | Ascusb_1667 | 179 |
| Treponema | Ascusb_1689 | 180 |
| Prevotella | Ascusb_1708 | 181 |
| Anaerovorax | Ascusb_1723 | 182 |
| Prevotella | Ascusb_1727 | 183 |
| Methanobrevibacter | Ascusb_1739 | 184 |
| Corynebacterium | Ascusb_1773 | 185 |
| Clostridium_XlVa | Ascusb_1793 | 186 |
| Alkaliphilus | Ascusb_1795 | 187 |
| Ruminococcus | Ascusb_1797 | 188 |
| Clostridium_XlVa | Ascusb_1806 | 189 |
| Eubacterium | Ascusb_1819 | 190 |
| Bacteroides | Ascusb_1835 | 191 |
| Roseburia | Ascusb_1886 | 192 |
| Lentisphaera | Ascusb_1901 | 193 |
| Eubacterium | Ascusb_1905 | 194 |
| Roseburia | Ascusb_1918 | 195 |
| Clostridium_IV | Ascusb_1922 | 196 |
| Hahella | Ascusb_1947 | 197 |
| Butyricicoccus | Ascusb_1969 | 198 |
| Clostridium_IV | Ascusb_2016 | 199 |
| Prevotella | Ascusb_2024 | 200 |
| Clostridium_IV | Ascusb_2058 | 201 |
| Desulfovibrio | Ascusb_2081 | 202 |
| Sphingobacterium | Ascusb_2101 | 203 |
| Roseburia | Ascusb_2105 | 204 |
| Bacteroides | Ascusb_2131 | 205 |
| Ruminococcus | Ascusb_2141 | 206 |
| Prevotella | Ascusb_2156 | 207 |
| Asteroleplasma | Ascusb_2168 | 208 |
| Syntrophococcus | Ascusb_2182 | 209 |
| Victivallis | Ascusb_2199 | 210 |
| Lachnobacterium | Ascusb_2210 | 211 |
| Lachnospiracea_incertae_sedis | Ascusb_2211 | 212 |
| Clostridium_IV | Ascusb_2218 | 213 |
| Anaerorhabdus | Ascusb_2221 | 214 |
| Altererythrobacter | Ascusb_2236 | 215 |
| Clostridium_XlVa | Ascusb_2246 | 216 |
| Clostridium_XlVa | Ascusb_2263 | 217 |
| Proteiniclasticum | Ascusb_2264 | 218 |
| Bifidobacterium | Ascusb_2308 | 219 |
| Clostridium_XlVa | Ascusb_2322 | 220 |
| Clostridium_XlVa | Ascusb_2323 | 221 |
| Desulfovibrio | Ascusb_2332 | 222 |
| Clostridium_XlVa | Ascusb_2353 | 223 |
| Nitrobacter | Ascusb_2375 | 224 |
| Enterorhabdus | Ascusb_2414 | 225 |
| Clostridium_{—}sensu_{—}stricto | Ascusb_2429 | 226 |
| Oscillibacter | Ascusb_2435 | 227 |
| Nautilia | Ascusb_2437 | 228 |
| Corynebacterium | Ascusb_2447 | 229 |
| Ruminococcus | Ascusb_2452 | 230 |
| Coprococcus | Ascusb_2461 | 231 |
| Eubacterium | Ascusb_2462 | 232 |
| Rikenella | Ascusb_2470 | 233 |
| Clostridium_XlVa | Ascusb_2482 | 234 |
| Paenibacillus | Ascusb_2487 | 235 |
| Ruminococcus | Ascusb_2492 | 236 |
| Prevotella | Ascusb_2503 | 237 |
| Haematobacter | Ascusb_2504 | 238 |
| Prevotella | Ascusb_2523 | 239 |
| Clostridium_XlVa | Ascusb_2537 | 240 |
| Lachnospiracea_incertae_sedis | Ascusb_2538 | 241 |
| Enterorhabdus | Ascusb_2565 | 242 |
| Blautia | Ascusb_2591 | 243 |
| Sporobacter | Ascusb_2592 | 244 |
| Oscillibacter | Ascusb_2607 | 245 |
| Clostridium_XlVa | Ascusb_2608 | 246 |
| Atopobium | Ascusb_2613 | 247 |
| Sporobacter | Ascusb_2626 | 248 |
| Clostridium_XlVa | Ascusb_2629 | 249 |
| Candidate Phylum OD1 | Ascusb_2643 | 250 |
| Oscillibacter | Ascusb_2645 | 251 |
| Clostridium_XlVa | Ascusb_2647 | 252 |
| Clostridium_IV | Ascusb_2649 | 253 |
| Mogibacterium | Ascusb_2653 | 254 |
| Roseburia | Ascusb_2663 | 255 |
| Lachnospiracea_incertae_sedis | Ascusb_2671 | 256 |
| Pelotomaculum | Ascusb_2696 | 257 |
| Pelotomaculum | Ascusb_2712 | 258 |
| Clostridium_XlVa | Ascusb_2713 | 259 |
| Robinsoniella | Ascusb_2730 | 260 |
| Coprococcus | Ascusb_2746 | 261 |
| Wautersiella | Ascusb_2757 | 262 |
| Lachnospiracea_incertae_sedis | Ascusb_2762 | 263 |
| Planctomyces | Ascusb_2764 | 264 |
| Treponema | Ascusb_2800 | 265 |
| Coprococcus | Ascusb_2806 | 266 |
| Paracoccus | Ascusb_2809 | 267 |
| Ruminococcus | Ascusb_2811 | 268 |
| Atopobium | Ascusb_2814 | 269 |
| Prevotella | Ascusb_2825 | 270 |
| Clostridium_IV | Ascusb_2832 | 271 |
| Clostridium_XlVa | Ascusb_2838 | 272 |
| Clostridium_XlVa | Ascusb_2843 | 273 |
| Clostridium_XlVa | Ascusb_2853 | 274 |
| Prevotella | Ascusb_2857 | 275 |
| Dethiosulfovibrio | Ascusb_2872 | 276 |
| Clostridium_XI | Ascusb_2885 | 277 |
| Clostridium_IV | Ascusb_2907 | 278 |
| Saccharofermentans | Ascusb_2909 | 279 |
| Clostridium_{—}sensu_{—}stricto | Ascusb_2912 | 280 |
| Roseburia | Ascusb_2914 | 281 |
| Lachnospiracea_incertae_sedis | Ascusb_2930 | 282 |
| Candidate phylum SR1 | Ascusb_2946 | 283 |
| Hydrogenoanaerobacterium | Ascusb_2948 | 284 |
| Victivallis | Ascusb_2966 | 285 |
| Clostridium_IV | Ascusb_2983 | 286 |
| Pelotomaculum | Ascusb_2988 | 287 |
| Clostridium_XlVa | Ascusb_2990 | 288 |
| Saccharofermentans | Ascusb_3005 | 289 |
| Lachnospiracea_incertae_sedis | Ascusb_3008 | 290 |
| Coprococcus | Ascusb_3010 | 291 |
| Clostridium_XlVa | Ascusb_3022 | 292 |
| Clostridium_XlVb | Ascusb_3029 | 293 |
| Papillibacter | Ascusb_3053 | 294 |
| Bartonella | Ascusb_3056 | 295 |
| Clostridium_IV | Ascusb_3058 | 296 |
| Eubacterium | Ascusb_3061 | 297 |
| Asaccharobacter | Ascusb_3066 | 298 |
| Clostridium_IV | Ascusb_3073 | 299 |
| Blautia | Ascusb_3074 | 300 |
| Prevotella | Ascusb_3079 | 301 |
| Ruminococcus | Ascusb_3087 | 302 |
| Selenomonas | Ascusb_3120 | 303 |
| Treponema | Ascusb_3142 | 304 |
| Adlercreutzia | Ascusb_3147 | 305 |
| Butyricicoccus | Ascusb_3161 | 306 |
| Pseudoflavonifractor | Ascusb_3163 | 307 |
| Corynebacterium | Ascusb_3165 | 308 |
| Adlercreutzia | Ascusb_3188 | 309 |
| Selenomonas | Ascusb_3197 | 310 |
| Coraliomargarita | Ascusb_3213 | 311 |
| Paraprevotella | Ascusb_3225 | 312 |
| Oscillibacter | Ascusb_3229 | 313 |
| Anaerovorax | Ascusb_3240 | 314 |
| Clostridium_XlVa | Ascusb_3242 | 315 |
| Saccharofermentans | Ascusb_3248 | 316 |
| Erysipelothrix | Ascusb_3263 | 317 |
| Agaricicola | Ascusb_3275 | 318 |
| Denitrobacterium | Ascusb_3285 | 319 |
| Armatimonadetes | Ascusb_3299 | 320 |
| Asaccharobacter | Ascusb_3304 | 321 |
| Anaeroplasma | Ascusb_3322 | 322 |
| Prevotella | Ascusb_3333 | 323 |
| Lachnospiracea_incertae_sedis | Ascusb_3339 | 324 |
| Clostridium_IV | Ascusb_3351 | 325 |
| Streptococcus | Ascusb_3376 | 326 |
| Cellulosilyticum | Ascusb_3393 | 327 |
| Asaccharobacter | Ascusb_3405 | 328 |
| Enterorhabdus | Ascusb_3408 | 329 |
| Treponema | Ascusb_3415 | 330 |
| Roseburia | Ascusb_3417 | 331 |
| Victivallis | Ascusb_3422 | 332 |
| Prevotella | Ascusb_3424 | 333 |
| Roseburia | Ascusb_3446 | 334 |
| Ruminococcus | Ascusb_3451 | 335 |
| Mogibacterium | Ascusb_3456 | 336 |
| Lachnospiracea_incertae_sedis | Ascusb_3467 | 337 |
| Prevotella | Ascusb_3479 | 338 |
| Clostridium_{—}sensu_{—}stricto | Ascusb_3480 | 339 |
| Victivallis | Ascusb_3481 | 340 |
| Cyanobacteria | Ascusb_3482 | 341 |
| Treponema | Ascusb_3483 | 342 |
| Stenotrophomonas | Ascusb_3484 | 343 |
| | Ascusb_3492 | 344 |
| Clostridium_XlVa | Ascusb_3494 | 345 |
| Sphingobium | Ascusb_3495 | 346 |
| Lachnospiracea_incertae_sedis | Ascusb_3512 | 347 |
| Oscillibacter | Ascusb_3518 | 348 |
| Methylobacterium | Ascusb_3523 | 349 |
| Zhangella | Ascusb_3530 | 350 |
| Lachnospiracea_incertae_sedis | Ascusb_3545 | 351 |
| Oscillibacter | Ascusb_3546 | 352 |
| Clostridium_III | Ascusb_3548 | 353 |
| Coraliomargarita | Ascusb_3563 | 354 |
| Eubacterium | Ascusb_3575 | 355 |
| Enterorhabdus | Ascusb_3578 | 356 |
| Clostridium_XlVa | Ascusb_3587 | 357 |
| Saccharofermentans | Ascusb_3592 | 358 |
| Clostridium_IV | Ascusb_3600 | 359 |
| Clostridium_{—}sensu_{—}stricto | Ascusb_3602 | 360 |
| Victivallis | Ascusb_3638 | 361 |
| Coprococcus | Ascusb_3642 | 362 |
| Pseudoflavonifractor | Ascusb_3647 | 363 |
| Anaeroplasma | Ascusb_3674 | 364 |
| Anaeroplasma | Ascusb_3687 | 365 |
| Bacteroides | Ascusb_3700 | 366 |
| Acinetobacter | Ascusb_3717 | 367 |
| Victivallis | Ascusb_3724 | 368 |
| Victivallis | Ascusb_3725 | 369 |
| Mogibacterium | Ascusb_3728 | 370 |
| Oscillibacter | Ascusb_3746 | 371 |
| Butyricimonas | Ascusb_3748 | 372 |
| Dethiosulfovibrio | Ascusb_3750 | 373 |
| Pseudoflavonifractor | Ascusb_3751 | 374 |
| Clostridium_IV | Ascusb_3762 | 375 |
| Anaeroplasma | Ascusb_3763 | 376 |
| Oscillibacter | Ascusb_3768 | 377 |
| Herbiconiux | Ascusb_3775 | 378 |
| Eubacterium | Ascusb_3779 | 379 |
| Armatimonadetes | Ascusb_3789 | 380 |
| Selenomonas | Ascusb_3796 | 381 |
| Clostridium_IV | Ascusb_3811 | 382 |
| Mogibacterium | Ascusb_3825 | 383 |
| Clostridium_IV | Ascusb_3838 | 384 |
| Roseburia | Ascusb_3849 | 385 |
| Anaerovibrio | Ascusb_3866 | 386 |
| Clostridium_III | Ascusb_3875 | 387 |
| Saccharofermentans | Ascusb_3903 | 388 |
| Saccharofermentans | Ascusb_3911 | 389 |
| Prevotella | Ascusb_3914 | 390 |
| Clostridium_XlVa | Ascusb_3919 | 391 |
| Robinsoniella | Ascusb_3950 | 392 |
| Brevundimonas | Ascusb_3952 | 393 |
| Anaerotruncus | Ascusb_3970 | 394 |
| Victivallis | Ascusb_3982 | 395 |
| Bacteroides | Ascusb_4008 | 396 |
| Clostridium_XlVb | Ascusb_4019 | 397 |
| Prevotella | Ascusb_4033 | 398 |
| Ruminococcus | Ascusb_4034 | 399 |
| Pelobacter | Ascusb_4040 | 400 |
| Clostridium_XlVa | Ascusb_4063 | 401 |
| Clostridium_XlVa | Ascusb_4067 | 402 |
| Clostridium_XlVb | Ascusb_4083 | 403 |
| Coprococcus | Ascusb_4085 | 404 |
| Clostridium_IV | Ascusb_4086 | 405 |
| Clostridium_IV | Ascusb_4095 | 406 |
| Coprococcus | Ascusb_4114 | 407 |
| Victivallis | Ascusb_4115 | 408 |
| Clostridium_III | Ascusb_4118 | 409 |
| Anaerovibrio | Ascusb_4120 | 410 |
| Anaerovorax | Ascusb_4124 | 411 |
| Proteiniclasticum | Ascusb_4142 | 412 |
| Anaerovorax | Ascusb_4143 | 413 |
| Selenomonas | Ascusb_4149 | 414 |
| Hydrogenoanaerobacterium | Ascusb_4155 | 415 |
| Acetanaerobacterium | Ascusb_4156 | 416 |
| Clostridium_XlVa | Ascusb_4159 | 417 |
| Asaccharobacter | Ascusb_4161 | 418 |
| Clostridium_XlVa | Ascusb_4167 | 419 |
| Lachnospiracea_incertae_sedis | Ascusb_4171 | 420 |
| Saccharofermentans | Ascusb_4172 | 421 |
| Prevotella | Ascusb_4176 | 422 |
| Anaeroplasma | Ascusb_4179 | 423 |
| Spirochaeta | Ascusb_4188 | 424 |
| Alkaliphilus | Ascusb_4213 | 425 |
| Paraprevotella | Ascusb_4215 | 426 |
| Hippea | Ascusb_4217 | 427 |
| Prevotella | Ascusb_4223 | 428 |
| Prevotella | Ascusb_4237 | 429 |
| Hydrogenoanaerobacterium | Ascusb_4241 | 430 |
| Clostridium_{—}sensu_{—}stricto | Ascusb_4265 | 431 |
| Paraeggerthella | Ascusb_4266 | 432 |
| Clostridium_XlVa | Ascusb_4277 | 433 |
| Clostridium_XlVa | Ascusb_4279 | 434 |
| Clostridium_IV | Ascusb_4281 | 435 |
| Clostridium_XlVa | Ascusb_4292 | 436 |
| Adhaeribacter | Ascusb_4313 | 437 |
| Syntrophococcus | Ascusb_4316 | 438 |
| Clostridium_{—}sensu_{—}stricto | Ascusb_4317 | 439 |
| Saccharofermentans | Ascusb_4326 | 440 |
| Clostridium_IV | Ascusb_4332 | 441 |
| Clostridium_IV | Ascusb_4345 | 442 |
| Clostridium_{—}sensu_{—}stricto | Ascusb_4347 | 443 |
| Coraliomargarita | Ascusb_4375 | 444 |
| Sharpea | Ascusb_4380 | 445 |
| Clostridium_IV | Ascusb_4394 | 446 |
| Anaerovorax | Ascusb_4416 | 447 |
| Blautia | Ascusb_4421 | 448 |
| Clostridium_XlVa | Ascusb_4422 | 449 |
| Clostridium_IV | Ascusb_4432 | 450 |
| Anaerovorax | Ascusb_4433 | 451 |
| Coraliomargarita | Ascusb_4434 | 452 |
| Lachnospiracea_incertae_sedis | Ascusb_4442 | 453 |
| Aquiflexum | Ascusb_4449 | 454 |
| Pedobacter | Ascusb_4450 | 455 |
| Robinsoniella | Ascusb_4457 | 456 |
| Pelomonas | Ascusb_4468 | 457 |
| Saccharofermentans | Ascusb_4469 | 458 |
| Paracoccus | Ascusb_4479 | 459 |
| Enterorhabdus | Ascusb_4486 | 460 |
| Beijerinckia | Ascusb_4496 | 461 |
| Sporobacter | Ascusb_4505 | 462 |
| Clostridium_IV | Ascusb_4517 | 463 |
| Bacillus | Ascusb_4522 | 464 |
| Saccharofermentans | Ascusb_4537 | 465 |
| Spirochaeta | Ascusb_4545 | 466 |
| Prevotella | Ascusb_4548 | 467 |
| Eubacterium | Ascusb_4556 | 468 |
| Herbiconiux | Ascusb_4559 | 469 |
| Brevundimonas | Ascusb_4560 | 470 |
| Mogibacterium | Ascusb_4563 | 471 |
| Anaerorhabdus | Ascusb_4566 | 472 |
| Victivallis | Ascusb_4569 | 473 |
| Prevotella | Ascusb_4573 | 474 |
| Anaerovorax | Ascusb_4579 | 475 |
| Aquiflexum | Ascusb_4606 | 476 |
| Oscillibacter | Ascusb_4618 | 477 |
| Altererythrobacter | Ascusb_4626 | 478 |
| Hydrogenoanaerobacterium | Ascusb_4627 | 479 |
| Clostridium_III | Ascusb_4634 | 480 |
| Clostridium_XlVb | Ascusb_4639 | 481 |
| Saccharofermentans | Ascusb_4644 | 482 |
| Roseburia | Ascusb_4652 | 483 |
| Anaeroplasma | Ascusb_4657 | 484 |
| Planctomyces | Ascusb_4676 | 485 |
| Ruminococcus | Ascusb_4679 | 486 |
| Selenomonas | Ascusb_4695 | 487 |
| Anaeroplasma | Ascusb_4696 | 488 |
| Anaerovorax | Ascusb_4700 | 489 |
| Rummeliibacillus | Ascusb_4701 | 490 |
| Clostridium_XlVa | Ascusb_4716 | 491 |
| Anaeroplasma | Ascusb_4731 | 492 |
| Butyrivibrio | Ascusb_4737 | 493 |
| Lachnospiracea_incertae_sedis | Ascusb_4738 | 494 |
| Anaerotruncus | Ascusb_4758 | 495 |
| Syntrophococcus | Ascusb_4763 | 496 |
| Paraeggerthella | Ascusb_4795 | 497 |
| Papillibacter | Ascusb_4800 | 498 |
| Lachnospiracea_incertae_sedis | Ascusb_4805 | 499 |
| Prevotella | Ascusb_4820 | 500 |
| Papillibacter | Ascusb_4828 | 501 |
| Streptococcus | Ascusb_4852 | 502 |
| Methanobrevibacter | Ascusb_4859 | 503 |
| Prevotella | Ascusb_4861 | 504 |
| Prevotella | Ascusb_4867 | 505 |
| Prevotella | Ascusb_4873 | 506 |
| Coraliomargarita | Ascusb_4882 | 507 |
| Prevotella | Ascusb_4886 | 508 |
| Thermotalea | Ascusb_4893 | 509 |
| Clostridium_XlVa | Ascusb_4897 | 510 |
| Atopobium | Ascusb_4945 | 511 |
| Prevotella | Ascusb_4969 | 512 |
| Mogibacterium | Ascusb_4972 | 513 |
| Clostridium_XlVa | Ascusb_4976 | 514 |
| Clostridium_XlVa | Ascusb_4997 | 515 |
| Eggerthella | Ascusb_4999 | 516 |
| Blautia | Ascusb_5000 | 517 |
| Vampirovibrio | Ascusb_5006 | 518 |
| Papillibacter | Ascusb_5040 | 519 |
| Beijerinckia | Ascusb_5058 | 520 |
| Bacteroides | Ascusb_5060 | 521 |
| Desulfotomaculum | Ascusb_5065 | 522 |
| Acidobacteria | Ascusb_5069 | 523 |
| Clostridium_XlVa | Ascusb_5081 | 524 |
| Clostridium_XlVa | Ascusb_5089 | 525 |
| Clostridium_XlVa | Ascusb_5095 | 526 |
| Cryptanaerobacter | Ascusb_5103 | 527 |
| Prevotella | Ascusb_5113 | 528 |
| Syntrophomonas | Ascusb_5137 | 529 |
| Erysipelothrix | Ascusb_5144 | 530 |
| Selenomonas | Ascusb_5165 | 531 |
| Clostridium_III | Ascusb_5171 | 532 |
| Flavobacterium | Ascusb_5181 | 533 |
| Thermotalea | Ascusb_5191 | 534 |
| Lachnospiracea_incertae_sedis | Ascusb_5194 | 535 |
| Mucilaginibacter | Ascusb_5197 | 536 |
| Bacteroides | Ascusb_5198 | 537 |
| Ruminococcus | Ascusb_5206 | 538 |
| Clostridium_XlVa | Ascusb_5223 | 539 |
| Asaccharobacter | Ascusb_5225 | 540 |
| Blautia | Ascusb_5235 | 541 |
| Mucilaginibacter | Ascusb_5247 | 542 |
| Coprococcus | Ascusb_5252 | 543 |
| Lachnospiracea_incertae_sedis | Ascusb_5253 | 544 |
| Butyricimonas | Ascusb_5255 | 545 |
| Lachnospiracea_incertae_sedis | Ascusb_5267 | 546 |
| Treponema | Ascusb_5280 | 547 |
| Clostridium_{—}sensu_{—}stricto | Ascusb_5281 | 548 |
| Clostridium_XlVa | Ascusb_5289 | 549 |
| Anaerovorax | Ascusb_5292 | 550 |
| Saccharofermentans | Ascusb_5294 | 551 |
| Clostridium_XlVa | Ascusb_5295 | 552 |
| Clostridium_III | Ascusb_5301 | 553 |
| Clostridium_IV | Ascusb_5313 | 554 |
| Ruminococcus | Ascusb_5324 | 555 |
| Clostridium_XlVa | Ascusb_5326 | 556 |
| Clostridium_XI | Ascusb_5335 | 557 |
| Clostridium_XlVa | Ascusb_5336 | 558 |
| Eubacterium | Ascusb_5338 | 559 |
| Lachnospiracea_incertae_sedis | Ascusb_5342 | 560 |
| Clostridium_IV | Ascusb_5352 | 561 |
| Ruminococcus | Ascusb_5353 | 562 |
| Clostridium_IV | Ascusb_5354 | 563 |
| Faecalibacterium | Ascusb_5360 | 564 |
| Anaerovibrio | Ascusb_5368 | 565 |
| Asaccharobacter | Ascusb_5397 | 566 |
| Pelotomaculum | Ascusb_5411 | 567 |
| Spirochaeta | Ascusb_5422 | 568 |
| Prevotella | Ascusb_5429 | 569 |
| Lachnospiracea_incertae_sedis | Ascusb_5440 | 570 |
| Anaerovorax | Ascusb_5441 | 571 |
| Clostridium_IV | Ascusb_5443 | 572 |
| Victivallis | Ascusb_5451 | 573 |
| Syntrophococcus | Ascusb_5456 | 574 |
| Syntrophococcus | Ascusb_5463 | 575 |
| Desulfovibrio | Ascusb_5481 | 576 |
| Lachnospiracea_incertae_sedis | Ascusb_5485 | 577 |
| Lachnospiracea_incertae_sedis | Ascusb_5495 | 578 |
| Clostridium_IV | Ascusb_5509 | 579 |
| Prevotella | Ascusb_5510 | 580 |
| Victivallis | Ascusb_5512 | 581 |
| Clostridium_XlVa | Ascusb_5515 | 582 |
| Selenomonas | Ascusb_5517 | 583 |
| Bacteroides | Ascusb_5530 | 584 |
| Clostridium_XlVa | Ascusb_5536 | 585 |
| Eggerthella | Ascusb_5554 | 586 |
| Selenomonas | Ascusb_5584 | 587 |
| Mogibacterium | Ascusb_5592 | 588 |
| Armatimonadetes | Ascusb_5609 | 589 |
| Clostridium_XlVa | Ascusb_5612 | 590 |
| Victivallis | Ascusb_5623 | 591 |
| Paraprevotella | Ascusb_5628 | 592 |
| Brevundimonas | Ascusb_5647 | 593 |
| Prevotella | Ascusb_5650 | 594 |
| Prevotella | Ascusb_5652 | 595 |
| Robinsoniella | Ascusb_5660 | 596 |
| Clostridium_III | Ascusb_5686 | 597 |
| Butyricimonas | Ascusb_5689 | 598 |
| Spirochaeta | Ascusb_5691 | 599 |
| Hydrogenoanaerobacterium | Ascusb_5694 | 600 |
| Proteiniclasticum | Ascusb_5716 | 601 |
| Roseburia | Ascusb_5725 | 602 |
| Clostridium_XlVa | Ascusb_5738 | 603 |
| Anaerofustis | Ascusb_5746 | 604 |
| Succiniclasticum | Ascusb_5765 | 605 |
| Anaeroplasma | Ascusb_5770 | 606 |
| Oscillibacter | Ascusb_5777 | 607 |
| Escherichia/Shigella | Ascusb_5789 | 608 |
| Bacteroides | Ascusb_5812 | 609 |
| Clostridium_XlVa | Ascusb_5830 | 610 |
| Clostridium_XlVa | Ascusb_5838 | 611 |
| Clostridium_IV | Ascusb_5841 | 612 |
| Clostridium_III | Ascusb_5845 | 613 |
| Prevotella | Ascusb_5847 | 614 |
| Coprococcus | Ascusb_5849 | 615 |
| Oscillibacter | Ascusb_5858 | 616 |
| Parabacteroides | Ascusb_5862 | 617 |
| Bacteroides | Ascusb_5868 | 618 |
| Mogibacterium | Ascusb_5869 | 619 |
| Solobacterium | Ascusb_5870 | 620 |
| Bacteroides | Ascusb_5874 | 621 |
| Clostridium_III | Ascusb_5877 | 622 |
| Victivallis | Ascusb_5879 | 623 |
| Saccharofermentans | Ascusb_5884 | 624 |
| Saccharofermentans | Ascusb_5889 | 625 |
| Olivibacter | Ascusb_5894 | 626 |
| Thermotalea | Ascusb_5895 | 627 |
| Proteiniclasticum | Ascusb_5913 | 628 |
| Clostridium_III | Ascusb_5926 | 629 |
| Anaeroplasma | Ascusb_5934 | 630 |
| Treponema | Ascusb_5939 | 631 |
| Clostridium_XlVa | Ascusb_5940 | 632 |
| Clostridium_III | Ascusb_5950 | 633 |
| Desulfotomaculum | Ascusb_5953 | 634 |
| Bacillus | Ascusb_5969 | 635 |
| Anaerovorax | Ascusb_5972 | 636 |
| Ruminococcus | Ascusb_5973 | 637 |
| Agarivorans | Ascusb_5975 | 638 |
| Anaerotruncus | Ascusb_5979 | 639 |
| Papillibacter | Ascusb_5984 | 640 |
| Clostridium_XlVa | Ascusb_5991 | 641 |
| Clostridium_III | Ascusb_5996 | 642 |
| Bacteroides | Ascusb_5997 | 643 |
| Clostridium_XlVa | Ascusb_5998 | 644 |
| Ruminococcus | Ascusb_6003 | 645 |
| Clostridium_XlVa | Ascusb_6005 | 646 |
| Oscillibacter | Ascusb_6006 | 647 |
| Nitrobacter | Ascusb_6022 | 648 |
| Clostridium_XlVa | Ascusb_6026 | 649 |
| Lachnospiracea_incertae_sedis | Ascusb_6035 | 650 |
| Limibacter | Ascusb_6037 | 651 |
| Desulfovibrio | Ascusb_6053 | 652 |
| Coprococcus | Ascusb_6067 | 653 |
| Anaerovorax | Ascusb_6070 | 654 |
| Spirochaeta | Ascusb_6074 | 655 |
| Cyanobacteria | Ascusb_6079 | 656 |
| Saccharofermentans | Ascusb_6081 | 657 |
| Anaeroplasma | Ascusb_6106 | 658 |
| Clostridium_III | Ascusb_6115 | 659 |
| Victivallis | Ascusb_6151 | 660 |
| Enterorhabdus | Ascusb_6168 | 661 |
| Clostridium_IV | Ascusb_6169 | 662 |
| Erysipelothrix | Ascusb_6172 | 663 |
| Clostridium_III | Ascusb_6200 | 664 |
| Clostridium_{—}sensu_{—}stricto | Ascusb_6207 | 665 |
| Gelidibacter | Ascusb_6212 | 666 |
| Roseburia | Ascusb_6219 | 667 |
| Neisseria | Ascusb_6270 | 668 |
| Prevotella | Ascusb_6273 | 669 |
| Cyanobacteria | Ascusb_6275 | 670 |
| Oscillibacter | Ascusb_6282 | 671 |
| Candidate phylum TM7 | Ascusb_6313 | 672 |
| Prevotella | Ascusb_6326 | 673 |
| Saccharofermentans | Ascusb_6330 | 674 |
| Erysipelotrichaceae_incertae_sedis | Ascusb_6337 | 675 |
| Spirochaeta | Ascusb_6342 | 676 |
| Clostridium_XlVa | Ascusb_6372 | 677 |
| Clostridium_XlVb | Ascusb_6376 | 678 |
| Clostridium_XlVa | Ascusb_6387 | 679 |
| Adlercreutzia | Ascusb_6389 | 680 |
| Clostridium_XlVa | Ascusb_6394 | 681 |
| Lachnospiracea_incertae_sedis | Ascusb_6400 | 682 |
| Clostridium_IV | Ascusb_6403 | 683 |
| Adlercreutzia | Ascusb_6406 | 684 |
| Prevotella | Ascusb_6409 | 685 |
| Syntrophococcus | Ascusb_6420 | 686 |
| Treponema | Ascusb_6433 | 687 |
| Prevotella | Ascusb_6448 | 688 |
| Clostridium_III | Ascusb_6450 | 689 |
| Pseudoflavonifractor | Ascusb_6463 | 690 |
| Clostridium_IV | Ascusb_6468 | 691 |
| Sharpea | Ascusb_6473 | 692 |
| Dongia | Ascusb_6499 | 693 |
| Eubacterium | Ascusb_6505 | 694 |
| Prevotella | Ascusb_6507 | 695 |
| Clostridium_IV | Ascusb_6519 | 696 |
| Parabacteroides | Ascusb_6525 | 697 |
| Brevundimonas | Ascusb_6535 | 698 |
| Clostridium_XlVa | Ascusb_6540 | 699 |
| Ruminococcus | Ascusb_6541 | 700 |
| Thermotalea | Ascusb_6558 | 701 |
| Victivallis | Ascusb_6561 | 702 |
| Anaeroplasma | Ascusb_6563 | 703 |
| Oscillibacter | Ascusb_6564 | 704 |
| Ruminococcus | Ascusb_6570 | 705 |
| Clostridium_XlVa | Ascusb_6578 | 706 |
| Clostridium_XlVa | Ascusb_6581 | 707 |
| Clostridium_IV | Ascusb_6586 | 708 |
| Roseburia | Ascusb_6593 | 709 |
| Eggerthella | Ascusb_6612 | 710 |
| Clostridium_III | Ascusb_6614 | 711 |
| Clostridium_XlVa | Ascusb_6621 | 712 |
| Lactobacillus | Ascusb_6630 | 713 |
| Bacteroides | Ascusb_6633 | 714 |
| Cellulosilyticum | Ascusb_6635 | 715 |
| Brevundimonas | Ascusb_6645 | 716 |
| Clostridium_IV | Ascusb_6670 | 717 |
| Prevotella | Ascusb_6672 | 718 |
| Helicobacter | Ascusb_6676 | 719 |
| Clostridium_IV | Ascusb_6683 | 720 |
| Proteiniclasticum | Ascusb_6684 | 721 |
| Brevundimonas | Ascusb_6701 | 722 |
| Clostridium_XlVa | Ascusb_6704 | 723 |
| Prevotella | Ascusb_6706 | 724 |
| Desulfovibrio | Ascusb_6708 | 725 |
| Coraliomargarita | Ascusb_6709 | 726 |
| Eubacterium | Ascusb_6715 | 727 |
| Sphingomonas | Ascusb_6718 | 728 |
| Prevotella | Ascusb_6730 | 729 |
| Clostridium_IV | Ascusb_6734 | 730 |
| Paraprevotella | Ascusb_6735 | 731 |
| Ruminococcus | Ascusb_6746 | 732 |
| Saccharofermentans | Ascusb_6756 | 733 |
| Clostridium_III | Ascusb_6757 | 734 |
| Clostridium_III | Ascusb_6774 | 735 |
| Turicibacter | Ascusb_6792 | 736 |
| Prevotella | Ascusb_6796 | 737 |
| Clostridium_XlVa | Ascusb_6803 | 738 |
| Fusibacter | Ascusb_6813 | 739 |
| Clostridium_XlVa | Ascusb_6824 | 740 |
| Clostridium_IV | Ascusb_6833 | 741 |
| Rummeliibacillus | Ascusb_6848 | 742 |
| Mogibacterium | Ascusb_6852 | 743 |
| Bacteroides | Ascusb_6864 | 744 |
| Pelospora | Ascusb_6875 | 745 |
| Eggerthella | Ascusb_6880 | 746 |
| Eubacterium | Ascusb_6887 | 747 |
| Blautia | Ascusb_6889 | 748 |
| Clostridium_XlVb | Ascusb_6901 | 749 |
| Ehrlichia | Ascusb_6907 | 750 |
| Eubacterium | Ascusb_6930 | 751 |
| Prevotella | Ascusb_6943 | 752 |
| Clostridium_XlVa | Ascusb_6952 | 753 |
| Treponema | Ascusb_6954 | 754 |
| Hydrogenoanaerobacterium | Ascusb_6957 | 755 |
| Selenomonas | Ascusb_6964 | 756 |
| Saccharofermentans | Ascusb_6966 | 757 |
| Clostridium_IV | Ascusb_6971 | 758 |
| Clostridium_{—}sensu_{—}stricto | Ascusb_6976 | 759 |
| Anaerovorax | Ascusb_6979 | 760 |
| Spirochaeta | Ascusb_6997 | 761 |
| Brevundimonas | Ascusb_7001 | 762 |
| Eubacterium | Ascusb_7017 | 763 |
| Clostridium_XlVa | Ascusb_7025 | 764 |
| Anaerovorax | Ascusb_7031 | 765 |
| Ruminococcus | Ascusb_7039 | 766 |
| Papillibacter | Ascusb_7040 | 767 |
| Clostridium_IV | Ascusb_7043 | 768 |
| Hydrogenoanaerobacterium | Ascusb_7046 | 769 |
| Asaccharobacter | Ascusb_7048 | 770 |
| Clostridium_XlVa | Ascusb_7054 | 771 |
| Rhodocista | Ascusb_7078 | 772 |
| Clostridium_XlVa | Ascusb_7087 | 773 |
| Beijerinckia | Ascusb_7091 | 774 |
| Lactobacillus | Ascusb_7101 | 775 |
| Cryptanaerobacter | Ascusb_7102 | 776 |
| Prevotella | Ascusb_7113 | 777 |
| Anaerovibrio | Ascusb_7114 | 778 |
| Anaerovorax | Ascusb_7123 | 779 |
| Lachnospiracea_incertae_sedis | Ascusb_7128 | 780 |
| Enterorhabdus | Ascusb_7131 | 781 |
| Clostridium_XlVb | Ascusb_7141 | 782 |
| Selenomonas | Ascusb_7148 | 783 |
| Eubacterium | Ascusb_7149 | 784 |
| Thermotalea | Ascusb_7151 | 785 |
| Enterorhabdus | Ascusb_7153 | 786 |
| Clostridium_III | Ascusb_7159 | 787 |
| Acetanaerobacterium | Ascusb_7164 | 788 |
| Treponema | Ascusb_7168 | 789 |
| Clostridium_XlVa | Ascusb_7176 | 790 |
| Enterorhabdus | Ascusb_7180 | 791 |
| Prevotella | Ascusb_7188 | 792 |
| Desulfovibrio | Ascusb_7199 | 793 |
| Aminobacter | Ascusb_7213 | 794 |
| Clostridium_IV | Ascusb_7224 | 795 |
| Rikenella | Ascusb_7225 | 796 |
| Gordonibacter | Ascusb_7240 | 797 |
| Papillibacter | Ascusb_7245 | 798 |
| Syntrophococcus | Ascusb_7246 | 799 |
| Clostridium_{—}sensu_{—}stricto | Ascusb_7256 | 800 |
| Hahella | Ascusb_7257 | 801 |
| Vampirovibrio | Ascusb_7264 | 802 |
| Coprococcus | Ascusb_7275 | 803 |
| Coraliomargarita | Ascusb_7299 | 804 |
| Clostridium_III | Ascusb_7300 | 805 |
| Clostridium_XlVa | Ascusb_7304 | 806 |
| Desulfotomaculum | Ascusb_7325 | 807 |
| Helicobacter | Ascusb_7373 | 808 |
| Syntrophococcus | Ascusb_7380 | 809 |
| Lachnospiracea_incertae_sedis | Ascusb_7384 | 810 |
| Clostridium_IV | Ascusb_7385 | 811 |
| Paludibacter | Ascusb_7395 | 812 |
| Lachnospiracea_incertae_sedis | Ascusb_7401 | 813 |
| Lachnospiracea_incertae_sedis | Ascusb_7412 | 814 |
| Adhaeribacter | Ascusb_7419 | 815 |
| Clostridium_IV | Ascusb_7420 | 816 |
| Cryptanaerobacter | Ascusb_7424 | 817 |
| Idiomarina | Ascusb_7435 | 818 |
| Clostridium_IV | Ascusb_7437 | 819 |
| Selenomonas | Ascusb_7440 | 820 |
| Acetanaerobacterium | Ascusb_7444 | 821 |
| Bifidobacterium | Ascusb_7446 | 822 |
| Clostridium_XlVb | Ascusb_7449 | 823 |
| Asaccharobacter | Ascusb_7450 | 824 |
| Eubacterium | Ascusb_7452 | 825 |
| Anaeroplasma | Ascusb_7455 | 826 |
| Saccharofermentans | Ascusb_7456 | 827 |
| Ruminococcus | Ascusb_7467 | 828 |
| Clostridium_III | Ascusb_7470 | 829 |
| Acholeplasma | Ascusb_7472 | 830 |
| Pedobacter | Ascusb_7476 | 831 |
| Sphingomonas | Ascusb_7487 | 832 |
| Verrucomicrobia | Ascusb_7525 | 833 |
| Anaerovorax | Ascusb_7533 | 834 |
| Spirochaeta | Ascusb_7534 | 835 |
| Paraeggerthella | Ascusb_7539 | 836 |
| Lachnospiracea_incertae_sedis | Ascusb_7542 | 837 |
| Bacteroides | Ascusb_7543 | 838 |
| Paenibacillus | Ascusb_7549 | 839 |
| Prevotella | Ascusb_7553 | 840 |
| Bacteroides | Ascusb_7555 | 841 |
| Clostridium_XlVa | Ascusb_7563 | 842 |
| Clostridium_XlVa | Ascusb_7568 | 843 |
| Roseburia | Ascusb_7572 | 844 |
| Clostridium_XlVa | Ascusb_7581 | 845 |
| Clostridium_III | Ascusb_7591 | 846 |
| Pedobacter | Ascusb_7599 | 847 |
| Robinsoniella | Ascusb_7614 | 848 |
| Anaeroplasma | Ascusb_7615 | 849 |
| Clostridium_XlVa | Ascusb_7622 | 850 |
| Hydrogenoanaerobacterium | Ascusb_7626 | 851 |
| Turicibacter | Ascusb_7638 | 852 |
| Papillibacter | Ascusb_7645 | 853 |
| Clostridium_XlVa | Ascusb_7647 | 854 |
| Saccharofermentans | Ascusb_7648 | 855 |
| Clostridium_XlVb | Ascusb_7650 | 856 |
| Sporobacter | Ascusb_7662 | 857 |
| Asaccharobacter | Ascusb_7663 | 858 |
| Bacteroides | Ascusb_7669 | 859 |
| Anaeroplasma | Ascusb_7677 | 860 |
| Sporobacter | Ascusb_7680 | 861 |
| Streptomyces | Ascusb_7690 | 862 |
| Arcobacter | Ascusb_7694 | 863 |
| Clostridium_XlVa | Ascusb_7699 | 864 |
| Barnesiella | Ascusb_7706 | 865 |
| Lactobacillus | Ascusb_7723 | 866 |
| Flavobacterium | Ascusb_7728 | 867 |
| Victivallis | Ascusb_7733 | 868 |
| Clostridium_XlVa | Ascusb_7735 | 869 |
| Ureaplasma | Ascusb_7748 | 870 |
| Acetanaerobacterium | Ascusb_7752 | 871 |
| Slackia | Ascusb_7753 | 872 |
| Lachnospiracea_incertae_sedis | Ascusb_7761 | 873 |
| Oscillibacter | Ascusb_7763 | 874 |
| Prevotella | Ascusb_7765 | 875 |
| Proteiniphilum | Ascusb_7767 | 876 |
| Spirochaeta | Ascusb_7784 | 877 |
| Ruminococcus | Ascusb_7788 | 878 |
| Prevotella | Ascusb_7792 | 879 |
| Butyricicoccus | Ascusb_7796 | 880 |
| Devosia | Ascusb_7817 | 881 |
| Anaeroplasma | Ascusb_7828 | 882 |
| Oscillibacter | Ascusb_7829 | 883 |
| Barnesiella | Ascusb_7831 | 884 |
| Atopobium | Ascusb_7837 | 885 |
| Clostridium_XlVa | Ascusb_7838 | 886 |
| Methanobrevibacter | Ascusb_7839 | 887 |
| Butyricimonas | Ascusb_7849 | 888 |
| Butyricimonas | Ascusb_7853 | 889 |
| Asaccharobacter | Ascusb_7855 | 890 |
| Enhydrobacter | Ascusb_7871 | 891 |
| Treponema | Ascusb_7872 | 892 |
| Clostridium_XlVa | Ascusb_7873 | 893 |
| Adlercreutzia | Ascusb_7874 | 894 |
| Prevotella | Ascusb_7890 | 895 |
| Pseudoflavonifractor | Ascusb_7896 | 896 |
| Syntrophococcus | Ascusb_7898 | 897 |
| Clostridium_IV | Ascusb_7901 | 898 |
| Demequina | Ascusb_7902 | 899 |
| Lachnospiracea_incertae_sedis | Ascusb_7904 | 900 |
| Saccharofermentans | Ascusb_7924 | 901 |
| Sphaerisporangium | Ascusb_7925 | 902 |
| Anaeroplasma | Ascusb_7939 | 903 |
| Geobacillus | Ascusb_7958 | 904 |
| Prevotella | Ascusb_7959 | 905 |
| Clostridium_XlVa | Ascusb_7967 | 906 |
| Victivallis | Ascusb_7973 | 907 |
| Bacteroides | Ascusb_7989 | 908 |
| Demequina | Ascusb_7990 | 909 |
| Paraeggerthella | Ascusb_7994 | 910 |
| Paraprevotella | Ascusb_7996 | 911 |
| Pseudoflavonifractor | Ascusb_8013 | 912 |
| Roseburia | Ascusb_8018 | 913 |
| Gelidibacter | Ascusb_8038 | 914 |
| Clostridium_IV | Ascusb_8069 | 915 |
| Rhizobium | Ascusb_8076 | 916 |
| Acholeplasma | Ascusb_8081 | 917 |
| Clostridium_XlVa | Ascusb_8084 | 918 |
| Bacteroides | Ascusb_8091 | 919 |
| Bacteroides | Ascusb_8105 | 920 |
| Papillibacter | Ascusb_8107 | 921 |
| Fusibacter | Ascusb_8113 | 922 |
| Coraliomargarita | Ascusb_8120 | 923 |
| Papillibacter | Ascusb_8123 | 924 |
| Clostridium_XlVa | Ascusb_8149 | 925 |
| Acholeplasma | Ascusb_8167 | 926 |
| Catenibacterium | Ascusb_8169 | 927 |
| Clostridium_IV | Ascusb_8172 | 928 |
| Clostridium_IV | Ascusb_8173 | 929 |
| Clostridium_IV | Ascusb_8179 | 930 |
| Nitrobacter | Ascusb_8182 | 931 |
| Victivallis | Ascusb_8189 | 932 |
| Selenomonas | Ascusb_8196 | 933 |
| Enterorhabdus | Ascusb_8200 | 934 |
| Eubacterium | Ascusb_8202 | 935 |
| Roseburia | Ascusb_8206 | 936 |
| Prevotella | Ascusb_8211 | 937 |
| Asaccharobacter | Ascusb_8222 | 938 |
| Bacteroides | Ascusb_8230 | 939 |
| Clostridium_XlVa | Ascusb_8238 | 940 |
| Gelidibacter | Ascusb_8245 | 941 |
| Brevundimonas | Ascusb_8254 | 942 |
| Clostridium_XlVa | Ascusb_8260 | 943 |
| Prevotella | Ascusb_8266 | 944 |
| Oscillibacter | Ascusb_8268 | 945 |
| Asteroleplasma | Ascusb_8280 | 946 |
| Anaeroplasma | Ascusb_8283 | 947 |
| Oscillibacter | Ascusb_8311 | 948 |
| Bilophila | Ascusb_8317 | 949 |
| Oscillibacter | Ascusb_8318 | 950 |
| Clostridium_IV | Ascusb_8320 | 951 |
| Prevotella | Ascusb_8321 | 952 |
| Geosporobacter | Ascusb_8329 | 953 |
| Butyricimonas | Ascusb_8363 | 954 |
| Pseudoflavonifractor | Ascusb_8366 | 955 |
| Barnesiella | Ascusb_8367 | 956 |
| Selenomonas | Ascusb_8370 | 957 |
| Prevotella | Ascusb_8374 | 958 |
| Enterorhabdus | Ascusb_8379 | 959 |
| Oscillibacter | Ascusb_8384 | 960 |
| Pelotomaculum | Ascusb_8394 | 961 |
| Cellulosilyticum | Ascusb_8396 | 962 |
| Clostridium_IV | Ascusb_8402 | 963 |
| Parabacteroides | Ascusb_8410 | 964 |
| Papillibacter | Ascusb_8413 | 965 |
| Bacteroides | Ascusb_8439 | 966 |
| Prevotella | Ascusb_8440 | 967 |
| Hydrogenoanaerobacterium | Ascusb_8447 | 968 |
| Clostridium_XlVa | Ascusb_8470 | 969 |
| Prevotella | Ascusb_8480 | 970 |
| Clostridium_IV | Ascusb_8484 | 971 |
| Howardella | Ascusb_8487 | 972 |
| Slackia | Ascusb_8498 | 973 |
| Methylobacter | Ascusb_8500 | 974 |
| Treponema | Ascusb_8508 | 975 |
| Clostridium_XlVa | Ascusb_8514 | 976 |
| Devosia | Ascusb_8518 | 977 |
| Ruminococcus | Ascusb_8537 | 978 |
| Lachnospiracea_incertae_sedis | Ascusb_8569 | 979 |
| Clostridium_III | Ascusb_8580 | 980 |
| Methanobrevibacter | Ascusb_8595 | 981 |
| Paraprevotella | Ascusb_8600 | 982 |
| Desulfobulbus | Ascusb_8627 | 983 |
| Butyricicoccus | Ascusb_8639 | 984 |
| Clostridium_XlVa | Ascusb_8657 | 985 |
| Dialister | Ascusb_8669 | 986 |
| Selenomonas | Ascusb_8681 | 987 |
| Spirochaeta | Ascusb_8696 | 988 |
| Clostridium_IV | Ascusb_8712 | 989 |
| Cellulosilyticum | Ascusb_8713 | 990 |
| Prevotella | Ascusb_8714 | 991 |
| Pseudoflavonifractor | Ascusb_8715 | 992 |
| Clostridium_III | Ascusb_8728 | 993 |
| Oscillibacter | Ascusb_8733 | 994 |
| Faecalibacterium | Ascusb_8746 | 995 |
| Clostridium_XlVb | Ascusb_8753 | 996 |
| Eubacterium | Ascusb_8758 | 997 |
| Clostridium_III | Ascusb_8762 | 998 |
| Prevotella | Ascusb_8769 | 999 |
| Paenibacillus | Ascusb_8771 | 1000 |
| Pedobacter | Ascusb_8782 | 1001 |
| Butyricicoccus | Ascusb_8786 | 1002 |
| Clostridium_XlVa | Ascusb_8787 | 1003 |
| Roseburia | Ascusb_8799 | 1004 |
| Hydrogenoanaerobacterium | Ascusb_8804 | 1005 |
| Adhaeribacter | Ascusb_8807 | 1006 |
| Eubacterium | Ascusb_8815 | 1007 |
| Bacteroides | Ascusb_8822 | 1008 |
| Victivallis | Ascusb_8835 | 1009 |
| Roseburia | Ascusb_8840 | 1010 |
| Treponema | Ascusb_8857 | 1011 |
| Prevotella | Ascusb_8860 | 1012 |
| Prevotella | Ascusb_8870 | 1013 |
| Hydrogenoanaerobacterium | Ascusb_8873 | 1014 |
| Clostridium_XlVa | Ascusb_8883 | 1015 |
| Bacteroides | Ascusb_8884 | 1016 |
| Bacteroides | Ascusb_8886 | 1017 |
| Lactobacillus | Ascusb_8888 | 1018 |
| Adlercreutzia | Ascusb_8892 | 1019 |
| Dethiosulfovibrio | Ascusb_8916 | 1020 |
| Lutispora | Ascusb_8934 | 1021 |
| Turicibacter | Ascusb_8942 | 1022 |
| Cyanobacteria | Ascusb_8953 | 1023 |
| Clostridium_{—}sensu_{—}stricto | Ascusb_8956 | 1024 |
| Cyanobacteria | Ascusb_8972 | 1025 |
| Bulleidia | Ascusb_9004 | 1026 |
| Aquiflexum | Ascusb_9015 | 1027 |
| Lachnospiracea_incertae_sedis | Ascusb_9026 | 1028 |
| Lachnospiracea_incertae_sedis | Ascusb_9073 | 1029 |
| Clostridium_III | Ascusb_9075 | 1030 |
| Roseburia | Ascusb_9081 | 1031 |
| Glaciecola | Ascusb_9086 | 1032 |
| Clostridium_XlVa | Ascusb_9090 | 1033 |
| Hydrogenoanaerobacterium | Ascusb_9095 | 1034 |
| Clostridium_IV | Ascusb_9097 | 1035 |
| Sphaerobacter | Ascusb_9098 | 1036 |
| Cyanobacteria | Ascusb_9105 | 1037 |
| Prevotella | Ascusb_9109 | 1038 |
| Turicibacter | Ascusb_9112 | 1039 |
| Ruminococcus | Ascusb_9122 | 1040 |
| Clostridium_IV | Ascusb_9131 | 1041 |
| Clostridium_XlVa | Ascusb_9145 | 1042 |
| Saccharofermentans | Ascusb_9151 | 1043 |
| Clostridium_XlVb | Ascusb_9154 | 1044 |
| Ruminococcus | Ascusb_9160 | 1045 |
| Fibrobacter | Ascusb_9169 | 1046 |
| Proteiniclasticum | Ascusb_9176 | 1047 |
| Anaeroplasma | Ascusb_9178 | 1048 |
| Cyanobacteria | Ascusb_9184 | 1049 |
| Algoriphagus | Ascusb_9189 | 1050 |
| Clostridium_XlVa | Ascusb_9196 | 1051 |
| Howardella | Ascusb_9200 | 1052 |
| Clostridium_XlVa | Ascusb_9201 | 1053 |
| Barnesiella | Ascusb_9211 | 1054 |
| Clostridium_IV | Ascusb_9234 | 1055 |
| Prevotella | Ascusb_9238 | 1056 |
| Clostridium_XlVa | Ascusb_9251 | 1057 |
| Butyricimonas | Ascusb_9261 | 1058 |
| Blautia | Ascusb_9264 | 1059 |
| Prevotella | Ascusb_9274 | 1060 |
| Clostridium_XlVa | Ascusb_9277 | 1061 |
| Blautia | Ascusb_9282 | 1062 |
| Clostridium_IV | Ascusb_9291 | 1063 |
| Flavobacterium | Ascusb_9292 | 1064 |
| Prevotella | Ascusb_9300 | 1065 |
| Clostridium_XlVa | Ascusb_9301 | 1066 |
| Clostridium_XlVa | Ascusb_9302 | 1067 |
| Eubacterium | Ascusb_9313 | 1068 |
| Butyricicoccus | Ascusb_9340 | 1069 |
| Fluviicola | Ascusb_9343 | 1070 |
| Anaerovibrio | Ascusb_9354 | 1071 |
| Blautia | Ascusb_9355 | 1072 |
| Verrucomicrobia | Ascusb_9367 | 1073 |
| Clostridium_{—}sensu_{—}stricto | Ascusb_9368 | 1074 |
| Spirochaeta | Ascusb_9369 | 1075 |
| Clostridium_XI | Ascusb_9372 | 1076 |
| Anaerovorax | Ascusb_9376 | 1077 |
| Roseburia | Ascusb_9381 | 1078 |
| Mucilaginibacter | Ascusb_9388 | 1079 |
| Clostridium_XI | Ascusb_9389 | 1080 |
| Lachnospiracea_incertae_sedis | Ascusb_9401 | 1081 |
| Prevotella | Ascusb_9402 | 1082 |
| Clostridium_III | Ascusb_9411 | 1083 |
| Lachnospiracea_incertae_sedis | Ascusb_9415 | 1084 |
| Coprococcus | Ascusb_9427 | 1085 |
| Acholeplasma | Ascusb_9432 | 1086 |
| Clostridium_III | Ascusb_9453 | 1087 |
| Lactobacillus | Ascusb_9454 | 1088 |
| Clostridium_IV | Ascusb_9455 | 1089 |
| Prevotella | Ascusb_9465 | 1090 |
| Bifidobacterium | Ascusb_9497 | 1091 |
| Adhaeribacter | Ascusb_9507 | 1092 |
| Hydrogenoanaerobacterium | Ascusb_9518 | 1093 |
| Acetivibrio | Ascusb_9521 | 1094 |
| Cyanobacteria | Ascusb_9532 | 1095 |
| Flammeovirga | Ascusb_9535 | 1096 |
| Dethiosulfovibrio | Ascusb_9543 | 1097 |
| Hippea | Ascusb_9545 | 1098 |
| Faecalibacterium | Ascusb_9558 | 1099 |
| Spirochaeta | Ascusb_9559 | 1100 |
| Brevundimonas | Ascusb_9563 | 1101 |
| Mucilaginibacter | Ascusb_9564 | 1102 |
| Hydrogenoanaerobacterium | Ascusb_9580 | 1103 |
| Asaccharobacter | Ascusb_9587 | 1104 |
| Clostridium_IV | Ascusb_9591 | 1105 |
| Mogibacterium | Ascusb_9605 | 1106 |
| Clostridium_IV | Ascusb_9617 | 1107 |
| Oscillibacter | Ascusb_9619 | 1108 |
| Clostridium_XlVa | Ascusb_9628 | 1109 |
| Faecalibacterium | Ascusb_9640 | 1110 |
| Altererythrobacter | Ascusb_9644 | 1111 |
| Gelidibacter | Ascusb_9656 | 1112 |
| Prevotella | Ascusb_9662 | 1113 |
| Anaerovorax | Ascusb_9663 | 1114 |
| Riemerella | Ascusb_9664 | 1115 |
| Sphingobacterium | Ascusb_9666 | 1116 |
| Syntrophococcus | Ascusb_9668 | 1117 |
| Bacteroides | Ascusb_9669 | 1118 |
| Papillibacter | Ascusb_9678 | 1119 |
| Butyricicoccus | Ascusb_9679 | 1120 |
| Clostridium_IV | Ascusb_9680 | 1121 |
| Hydrogenoanaerobacterium | Ascusb_9684 | 1122 |
| Marvinbryantia | Ascusb_9688 | 1123 |
| Brevibacillus | Ascusb_9701 | 1124 |
| Clostridium_IV | Ascusb_9715 | 1125 |
| Prevotella | Ascusb_9719 | 1126 |
| Clostridium_IV | Ascusb_9734 | 1127 |
| Aminobacter | Ascusb_9759 | 1128 |
| Sporotomaculum | Ascusb_9764 | 1129 |
| Clostridium_IV | Ascusb_9779 | 1130 |
| Pedobacter | Ascusb_9780 | 1131 |
| Victivallis | Ascusb_9782 | 1132 |
| Gelidibacter | Ascusb_9792 | 1133 |
| Prevotella | Ascusb_9824 | 1134 |
| Wautersiella | Ascusb_9839 | 1135 |
| Slackia | Ascusb_9846 | 1136 |
| Pyramidobacter | Ascusb_9851 | 1137 |
| Lachnospiracea_incertae_sedis | Ascusb_9862 | 1138 |
| Clostridium_XlVa | Ascusb_9869 | 1139 |
| Prevotella | Ascusb_9876 | 1140 |
| Lentisphaera | Ascusb_9886 | 1141 |
| Desulfoluna | Ascusb_9895 | 1142 |
| Clostridium_III | Ascusb_9897 | 1143 |
| Clostridium_{—}sensu_{—}stricto | Ascusb_9925 | 1144 |
| Prevotella | Ascusb_9929 | 1145 |
| Clostridium_III | Ascusb_9934 | 1146 |
| Clostridium_IV | Ascusb_9949 | 1147 |
| Prevotella | Ascusb_9951 | 1148 |
| Cyanobacteria | Ascusb_9954 | 1149 |
| Helicobacter | Ascusb_9958 | 1150 |
| Clostridium_XlVa | Ascusb_9977 | 1151 |
| Coprococcus | Ascusb_9982 | 1152 |
| Bradyrhizobium | Ascusb_9993 | 1153 |
| Clostridium_IV | Ascusb_9996 | 1154 |
| Sphingobacterium | Ascusb_10002 | 1155 |
| Gelidibacter | Ascusb_10023 | 1156 |
| Vasilyevaea | Ascusb_10029 | 1157 |
| Eubacterium | Ascusb_10030 | 1158 |
| Clostridium_XlVa | Ascusb_10034 | 1159 |
| Eubacterium | Ascusb_10044 | 1160 |
| Syntrophococcus | Ascusb_10045 | 1161 |
| Prevotella | Ascusb_10050 | 1162 |
| Treponema | Ascusb_10057 | 1163 |
| Anaerovorax | Ascusb_10058 | 1164 |
| Erysipelotrichaceae_incertae_sedis | Ascusb_10059 | 1165 |
| Sulfurovum | Ascusb_10084 | 1166 |
| Clostridium_IV | Ascusb_10085 | 1167 |
| Papillibacter | Ascusb_10087 | 1168 |
| Paracoccus | Ascusb_10094 | 1169 |
| Hydrogenoanaerobacterium | Ascusb_10102 | 1170 |
| Adhaeribacter | Ascusb_10121 | 1171 |
| Lachnospiracea_incertae_sedis | Ascusb_10126 | 1172 |
| Bacteroides | Ascusb_10127 | 1173 |
| Hydrogenoanaerobacterium | Ascusb_10129 | 1174 |
| Telmatospirillum | Ascusb_10138 | 1175 |
| Clostridium_XlVa | Ascusb_10144 | 1176 |
| Hydrogenoanaerobacterium | Ascusb_10147 | 1177 |
| Clostridium_IV | Ascusb_10156 | 1178 |
| Vasilyevaea | Ascusb_10164 | 1179 |
| Anaeroplasma | Ascusb_10177 | 1180 |
| Sporotomaculum | Ascusb_10193 | 1181 |
| Clostridium_IV | Ascusb_10194 | 1182 |
| Enterorhabdus | Ascusb_10204 | 1183 |
| Bacteroides | Ascusb_10208 | 1184 |
| Anaerotruncus | Ascusb_10210 | 1185 |
| Rhodopirellula | Ascusb_10215 | 1186 |
| Clostridium_XlVa | Ascusb_10221 | 1187 |
| Gelidibacter | Ascusb_10243 | 1188 |
| Anaerofustis | Ascusb_10268 | 1189 |
| Butyricicoccus | Ascusb_10269 | 1190 |
| Butyricicoccus | Ascusb_10278 | 1191 |
| Clostridium_XlVa | Ascusb_10281 | 1192 |
| Cryptanaerobacter | Ascusb_10284 | 1193 |
| Clostridium_XlVa | Ascusb_10299 | 1194 |
| Mogibacterium | Ascusb_10309 | 1195 |
| Syntrophococcus | Ascusb_10313 | 1196 |
| Bacteroides | Ascusb_10325 | 1197 |
| Treponema | Ascusb_10327 | 1198 |
| Coraliomargarita | Ascusb_10344 | 1199 |
| Ruminococcus | Ascusb_10368 | 1200 |
| Prevotella | Ascusb_10374 | 1201 |
| Pseudaminobacter | Ascusb_10380 | 1202 |
| Prevotella | Ascusb_10392 | 1203 |
| Treponema | Ascusb_10450 | 1204 |
| Syntrophococcus | Ascusb_10456 | 1205 |
| Clostridium_IV | Ascusb_10457 | 1206 |
| Tenacibaculum | Ascusb_10462 | 1207 |
| Parabacteroides | Ascusb_10466 | 1208 |
| Luteimonas | Ascusb_10469 | 1209 |
| Eubacterium | Ascusb_10488 | 1210 |
| Roseburia | Ascusb_10495 | 1211 |
| Oscillibacter | Ascusb_10504 | 1212 |
| Cyanobacteria | Ascusb_10529 | 1213 |
| Prevotella | Ascusb_10547 | 1214 |
| Clostridium_IV | Ascusb_10548 | 1215 |
| Treponema | Ascusb_10557 | 1216 |
| Clostridium_IV | Ascusb_10561 | 1217 |
| Victivallis | Ascusb_10562 | 1218 |
| Clostridium_XlVa | Ascusb_10576 | 1219 |
| Oscillibacter | Ascusb_10586 | 1220 |
| Papillibacter | Ascusb_10598 | 1221 |
| Cellulosilyticum | Ascusb_10604 | 1222 |
| Treponema | Ascusb_10607 | 1223 |
| Ruminococcus | Ascusb_10609 | 1224 |
| Coraliomargarita | Ascusb_10612 | 1225 |
| Butyricicoccus | Ascusb_10613 | 1226 |
| Blautia | Ascusb_10615 | 1227 |
| Lachnospiracea_incertae_sedis | Ascusb_10617 | 1228 |
| Prevotella | Ascusb_10622 | 1229 |
| Clostridium_IV | Ascusb_10623 | 1230 |
| Clostridium_IV | Ascusb_10635 | 1231 |
| Clostridium_III | Ascusb_10655 | 1232 |
| Neptunomonas | Ascusb_10677 | 1233 |
| Clostridium_IV | Ascusb_10682 | 1234 |
| Howardella | Ascusb_10685 | 1235 |
| Clostridium_IV | Ascusb_10687 | 1236 |
| Roseburia | Ascusb_10711 | 1237 |
| Oscillibacter | Ascusb_10739 | 1238 |
| Clostridium_XlVa | Ascusb_10740 | 1239 |
| Clostridium_IV | Ascusb_10741 | 1240 |
| Sporobacter | Ascusb_10749 | 1241 |
| Clostridium_XlVa | Ascusb_10769 | 1242 |
| Butyricicoccus | Ascusb_10774 | 1243 |
| Clostridium_XlVa | Ascusb_10787 | 1244 |
| Filomicrobium | Ascusb_10788 | 1245 |
| Bacteroides | Ascusb_10790 | 1246 |
| Clostridium_XlVa | Ascusb_10809 | 1247 |
| Brevundimonas | Ascusb_10812 | 1248 |
| Clostridium_IV | Ascusb_10817 | 1249 |
| Paracoccus | Ascusb_10818 | 1250 |
| Schlegelella | Ascusb_10837 | 1251 |
| Clostridium_XI | Ascusb_10844 | 1252 |
| Diaphorobacter | Ascusb_10847 | 1253 |
| Clostridium_{—}sensu_{—}stricto | Ascusb_10858 | 1254 |
| Saccharopolyspora | Ascusb_10863 | 1255 |
| Prevotella | Ascusb_10871 | 1256 |
| Eggerthella | Ascusb_10878 | 1257 |
| Gelidibacter | Ascusb_10888 | 1258 |
| Prevotella | Ascusb_10899 | 1259 |
| Pseudomonas | Ascusb_10922 | 1260 |
| Prevotella | Ascusb_10927 | 1261 |
| Prevotella | Ascusb_10937 | 1262 |
| Prevotella | Ascusb_10940 | 1263 |
| Brevundimonas | Ascusb_10945 | 1264 |
| Bacteroides | Ascusb_10982 | 1265 |
| Clostridium_XlVa | Ascusb_11015 | 1266 |
| Photobacterium | Ascusb_11027 | 1267 |
| Clostridium_XlVa | Ascusb_11031 | 1268 |
| Clostridium_XlVb | Ascusb_11032 | 1269 |
| Prevotella | Ascusb_11037 | 1270 |
| Clostridium_IV | Ascusb_11046 | 1271 |
| Anaeroplasma | Ascusb_11051 | 1272 |
| Caldilinea | Ascusb_11053 | 1273 |
| Clostridium_XlVa | Ascusb_11059 | 1274 |
| Victivallis | Ascusb_11061 | 1275 |
| Brevundimonas | Ascusb_11063 | 1276 |
| Cyanobacteria | Ascusb_11074 | 1277 |
| Prevotella | Ascusb_11120 | 1278 |
| Slackia | Ascusb_11124 | 1279 |
| Pedobacter | Ascusb_11125 | 1280 |
| Prevotella | Ascusb_11129 | 1281 |
| Trueperella | Ascusb_11141 | 1282 |
| Oscillibacter | Ascusb_11170 | 1283 |
| Cyanobacteria | Ascusb_11185 | 1284 |
| Victivallis | Ascusb_11199 | 1285 |
| Bacteroides | Ascusb_11200 | 1286 |
| Micrococcus | Ascusb_11207 | 1287 |
| Olivibacter | Ascusb_11209 | 1288 |
| Anaerophaga | Ascusb_11211 | 1289 |
| Selenomonas | Ascusb_11214 | 1290 |
| Megasphaera | Ascusb_11219 | 1291 |
| Clostridium_XlVa | Ascusb_11221 | 1292 |
| Clostridium_XlVa | Ascusb_11241 | 1293 |
| Eubacterium | Ascusb_11245 | 1294 |
| Cyanobacteria | Ascusb_11253 | 1295 |
| Clostridium_XlVa | Ascusb_11287 | 1296 |
| Treponema | Ascusb_11288 | 1297 |
| Cryptanaerobacter | Ascusb_11289 | 1298 |
| Xanthomonas | Ascusb_11301 | 1299 |
| Asteroleplasma | Ascusb_11302 | 1300 |
| Cyanobacteria | Ascusb_11315 | 1301 |
| Sporotomaculum | Ascusb_11321 | 1302 |
| Bacteroides | Ascusb_11324 | 1303 |
| Asaccharobacter | Ascusb_11330 | 1304 |
| Clostridium_IV | Ascusb_11343 | 1305 |
| Cyanobacteria | Ascusb_11348 | 1306 |
| Clostridium_XlVa | Ascusb_11362 | 1307 |
| Treponema | Ascusb_11365 | 1308 |
| Prevotella | Ascusb_11384 | 1309 |
| Turicibacter | Ascusb_11388 | 1310 |
| Clostridium_IV | Ascusb_11389 | 1311 |
| Clostridium_IV | Ascusb_11397 | 1312 |
| Clostridium_IV | Ascusb_11403 | 1313 |
| Oscillibacter | Ascusb_11410 | 1314 |
| Deinococcus | Ascusb_11423 | 1315 |
| Pedobacter | Ascusb_11427 | 1316 |
| Anaerovorax | Ascusb_11435 | 1317 |
| Clostridium_IV | Ascusb_11442 | 1318 |
| Bacteroides | Ascusb_11445 | 1319 |
| Clostridium_IV | Ascusb_11461 | 1320 |
| Rhodococcus | Ascusb_11463 | 1321 |
| Treponema | Ascusb_11464 | 1322 |
| Mucilaginibacter | Ascusb_11475 | 1323 |
| Clostridium_XlVa | Ascusb_11503 | 1324 |
| Olivibacter | Ascusb_11510 | 1325 |
| Clostridium_XlVa | Ascusb_11519 | 1326 |
| Barnesiella | Ascusb_11581 | 1327 |
| Clostridium_XlVb | Ascusb_11584 | 1328 |
| Gelidibacter | Ascusb_11600 | 1329 |
| Methanobrevibacter | Ascusb_11602 | 1330 |
| Anaerotruncus | Ascusb_11612 | 1331 |
| Lachnospiracea_incertae_sedis | Ascusb_11653 | 1332 |
| Erysipelotrichaceae_incertae_sedis | Ascusb_11656 | 1333 |
| Mesorhizobium | Ascusb_11681 | 1334 |
| Clostridium_XI | Ascusb_11695 | 1335 |
| Planctomyces | Ascusb_11698 | 1336 |
| Aerococcus | Ascusb_11713 | 1337 |
| Victivallis | Ascusb_11721 | 1338 |
| Cyanobacteria | Ascusb_11736 | 1339 |
| Bacteroides | Ascusb_11752 | 1340 |
| Clostridium_XI | Ascusb_11753 | 1341 |
| Clostridium_XlVa | Ascusb_11757 | 1342 |
| Ruminococcus | Ascusb_11761 | 1343 |
| Saccharofermentans | Ascusb_11780 | 1344 |
| Oscillibacter | Ascusb_11781 | 1345 |
| Lachnospiracea_incertae_sedis | Ascusb_11783 | 1346 |
| Fibrobacter | Ascusb_11793 | 1347 |
| Kiloniella | Ascusb_11809 | 1348 |
| Olivibacter | Ascusb_11819 | 1349 |
| Clostridium_IV | Ascusb_11821 | 1350 |
| Spirochaeta | Ascusb_11865 | 1351 |
| Prevotella | Ascusb_11870 | 1352 |
| Olivibacter | Ascusb_11881 | 1353 |
| Prevotella | Ascusb_11884 | 1354 |
| Parabacteroides | Ascusb_11885 | 1355 |
| Prevotella | Ascusb_11892 | 1356 |
| Leifsonia | Ascusb_11896 | 1357 |
| Clostridium_IV | Ascusb_11901 | 1358 |
| Victivallis | Ascusb_11903 | 1359 |
| Treponema | Ascusb_11929 | 1360 |
| Cyanobacteria | Ascusb_11952 | 1361 |
| Sporotomaculum | Ascusb_11954 | 1362 |
| Spirochaeta | Ascusb_11955 | 1363 |
| Clostridium_III | Ascusb_11960 | 1364 |
| Clostridium_XlVa | Ascusb_11962 | 1365 |
| Anaerovorax | Ascusb_11963 | 1366 |
| Oscillibacter | Ascusb_11964 | 1367 |
| Victivallis | Ascusb_11988 | 1368 |
| Lachnospiracea_incertae_sedis | Ascusb_11993 | 1369 |
| Spirochaeta | Ascusb_11997 | 1370 |
| Clostridium_XlVb | Ascusb_12000 | 1371 |
| Oscillibacter | Ascusb_12004 | 1372 |
| Prevotella | Ascusb_12013 | 1373 |
| Anaeroplasma | Ascusb_12046 | 1374 |
| Adlercreutzia | Ascusb_12054 | 1375 |
| Clostridium_XlVa | Ascusb_12061 | 1376 |
| Beijerinckia | Ascusb_12069 | 1377 |
| Prevotella | Ascusb_12106 | 1378 |
| Coprococcus | Ascusb_12110 | 1379 |
| Lentisphaera | Ascusb_12116 | 1380 |
| Clostridium_XlVa | Ascusb_12119 | 1381 |
| Saccharofermentans | Ascusb_12127 | 1382 |
| Porphyrobacter | Ascusb_12128 | 1383 |
| Rhodobacter | Ascusb_12140 | 1384 |
| Oscillibacter | Ascusb_12153 | 1385 |
| Roseburia | Ascusb_12160 | 1386 |
| Prevotella | Ascusb_12175 | 1387 |
| Aquiflexum | Ascusb_12177 | 1388 |
| Rhodopirellula | Ascusb_12187 | 1389 |
| Bacteroides | Ascusb_12191 | 1390 |
| Bacteroides | Ascusb_12216 | 1391 |
| Clostridium_XlVa | Ascusb_12221 | 1392 |
| Clostridium_IV | Ascusb_12227 | 1393 |
| Prevotella | Ascusb_12243 | 1394 |
| Mogibacterium | Ascusb_12248 | 1395 |
| Prevotella | Ascusb_12252 | 1396 |
| Clostridium_XlVa | Ascusb_12269 | 1397 |
| Prevotella | Ascusb_12270 | 1398 |
| Capnocytophaga | Ascusb_12276 | 1399 |
| Acholeplasma | Ascusb_12282 | 1400 |
| Clostridium_IV | Ascusb_12310 | 1401 |
| Succinivibrio | Ascusb_12327 | 1402 |
| Pseudonocardia | Ascusb_12339 | 1403 |
| Clostridium_XlVa | Ascusb_12353 | 1404 |
| Butyricimonas | Ascusb_12354 | 1405 |
| Anaerovorax | Ascusb_12355 | 1406 |
| Prevotella | Ascusb_12383 | 1407 |
| Butyricimonas | Ascusb_12399 | 1408 |
| Parabacteroides | Ascusb_12407 | 1409 |
| Clostridium_XlVa | Ascusb_12413 | 1410 |
| Clostridium_XlVb | Ascusb_12417 | 1411 |
| Bacteroides | Ascusb_12428 | 1412 |
| Cyanobacteria | Ascusb_12452 | 1413 |
| Riemerella | Ascusb_12461 | 1414 |
| Anaeroplasma | Ascusb_12487 | 1415 |
| Ruminococcus | Ascusb_12489 | 1416 |
| Verrucomicrobia | Ascusb_12499 | 1417 |
| Lachnospiracea_incertae_sedis | Ascusb_12511 | 1418 |
| Syntrophococcus | Ascusb_12512 | 1419 |
| Clostridium_IV | Ascusb_12520 | 1420 |
| Barnesiella | Ascusb_12534 | 1421 |
| Olivibacter | Ascusb_12553 | 1422 |
| Clostridium_XlVa | Ascusb_12574 | 1423 |
| Cryptanaerobacter | Ascusb_12577 | 1424 |
| Saccharofermentans | Ascusb_12578 | 1425 |
| Clostridium_IV | Ascusb_12599 | 1426 |
| Coprococcus | Ascusb_12600 | 1427 |
| Barnesiella | Ascusb_12606 | 1428 |
| Clostridium_{—}sensu_{—}stricto | Ascusb_12618 | 1429 |
| Hydrogenoanaerobacterium | Ascusb_12627 | 1430 |
| Clostridium_XlVb | Ascusb_12628 | 1431 |
| Selenomonas | Ascusb_12661 | 1432 |
| Prevotella | Ascusb_12662 | 1433 |
| Hydrogenoanaerobacterium | Ascusb_12679 | 1434 |
| Spirochaeta | Ascusb_12703 | 1435 |
| Enterorhabdus | Ascusb_12704 | 1436 |
| Thermoanaerobacter | Ascusb_12709 | 1437 |
| Armatimonadetes | Ascusb_12719 | 1438 |
| Syntrophococcus | Ascusb_12723 | 1439 |
| Sphingobium | Ascusb_12731 | 1440 |
| Clostridium_XlVa | Ascusb_12737 | 1441 |
| Geosporobacter | Ascusb_12740 | 1442 |
| Enterorhabdus | Ascusb_12746 | 1443 |
| Verrucomicrobia | Ascusb_12747 | 1444 |
| Clostridium_XlVa | Ascusb_12749 | 1445 |
| Parabacteroides | Ascusb_12750 | 1446 |
| Cryptanaerobacter | Ascusb_12769 | 1447 |
| Anaeroplasma | Ascusb_12775 | 1448 |
| Spirochaeta | Ascusb_12779 | 1449 |
| Prevotella | Ascusb_12804 | 1450 |
| Roseburia | Ascusb_12819 | 1451 |
| Pedobacter | Ascusb_12826 | 1452 |
| Pedobacter | Ascusb_12835 | 1453 |
| Eggerthella | Ascusb_12838 | 1454 |
| Prevotella | Ascusb_12853 | 1455 |
| Rikenella | Ascusb_12873 | 1456 |
| Anaerophaga | Ascusb_12894 | 1457 |
| Spirochaeta | Ascusb_12901 | 1458 |
| Clostridium_IV | Ascusb_12910 | 1459 |
| Weissella | Ascusb_12931 | 1460 |
| Butyricicoccus | Ascusb_12946 | 1461 |
| Hahella | Ascusb_12953 | 1462 |
| Acholeplasma | Ascusb_12960 | 1463 |
| Clostridium_XlVa | Ascusb_12962 | 1464 |
| Cellulosilyticum | Ascusb_12987 | 1465 |
| Verrucomicrobia | Ascusb_12995 | 1466 |
| Clostridium_XlVa | Ascusb_13002 | 1467 |
| Pseudoflavonifractor | Ascusb_13028 | 1468 |
| Calditerricola | Ascusb_13035 | 1469 |
| Clostridium_IV | Ascusb_13039 | 1470 |
| Clostridium_IV | Ascusb_13050 | 1471 |
| Adlercreutzia | Ascusb_13054 | 1472 |
| Bulleidia | Ascusb_13088 | 1473 |
| Lachnospiracea_incertae_sedis | Ascusb_13089 | 1474 |
| Mucilaginibacter | Ascusb_13115 | 1475 |
| Victivallis | Ascusb_13128 | 1476 |
| Anaerovorax | Ascusb_13130 | 1477 |
| Clostridium_XlVb | Ascusb_13134 | 1478 |
| Clostridium_XlVa | Ascusb_13154 | 1479 |
| Prevotella | Ascusb_13155 | 1480 |
| Bacteroides | Ascusb_13163 | 1481 |
| Schwartzia | Ascusb_13165 | 1482 |
| Pyramidobacter | Ascusb_13226 | 1483 |
| Eubacterium | Ascusb_13230 | 1484 |
| Lachnospiracea_incertae_sedis | Ascusb_13244 | 1485 |
| Clostridium_XlVa | Ascusb_13249 | 1486 |
| Roseburia | Ascusb_13254 | 1487 |
| Clostridium_XlVb | Ascusb_13276 | 1488 |
| Enterorhabdus | Ascusb_13284 | 1489 |
| Pedobacter | Ascusb_13291 | 1490 |
| Clostridium_{—}sensu_{—}stricto | Ascusb_13296 | 1491 |
| Clostridium_XlVa | Ascusb_13328 | 1492 |
| Clostridium_III | Ascusb_13343 | 1493 |
| Desulfotomaculum | Ascusb_13349 | 1494 |
| Clostridium_IV | Ascusb_13353 | 1495 |
| Proteiniclasticum | Ascusb_13371 | 1496 |
| Prevotella | Ascusb_13412 | 1497 |
| Faecalibacterium | Ascusb_13417 | 1498 |
| Microbacterium | Ascusb_13419 | 1499 |
| Leucobacter | Ascusb_13424 | 1500 |
| Prevotella | Ascusb_13426 | 1501 |
| Sphingobacterium | Ascusb_13457 | 1502 |
| Fusibacter | Ascusb_13458 | 1503 |
| Howardella | Ascusb_13463 | 1504 |
| Pedobacter | Ascusb_13488 | 1505 |
| Caldilinea | Ascusb_13504 | 1506 |
| Turicibacter | Ascusb_13513 | 1507 |
| Clostridium_IV | Ascusb_13516 | 1508 |
| Alistipes | Ascusb_13546 | 1509 |
| Clostridium_XlVa | Ascusb_13547 | 1510 |
| Clostridium_XlVa | Ascusb_13567 | 1511 |
| Prevotella | Ascusb_13597 | 1512 |
| Clostridium_XlVa | Ascusb_13611 | 1513 |
| Butyricimonas | Ascusb_13648 | 1514 |
| Anaerovibrio | Ascusb_13663 | 1515 |
| Prevotella | Ascusb_13675 | 1516 |
| Pseudoflavonifractor | Ascusb_13679 | 1517 |
| Corynebacterium | Ascusb_13763 | 1518 |
| Leucobacter | Ascusb_13780 | 1519 |
| Kerstersia | Ascusb_13819 | 1520 |
| Slackia | Ascusb_13835 | 1521 |
| Lactococcus | Ascusb_13839 | 1522 |
| Prevotella | Ascusb_13840 | 1523 |
| Clostridium_IV | Ascusb_13845 | 1524 |
| Prevotella | Ascusb_13848 | 1525 |
| Bacteroides | Ascusb_13867 | 1526 |
| Lactobacillus | Ascusb_13881 | 1527 |
| Prevotella | Ascusb_13892 | 1528 |
| Clostridium_XlVa | Ascusb_13895 | 1529 |
| Clostridium_{—}sensu_{—}stricto | Ascusb_13903 | 1530 |
| Syntrophococcus | Ascusb_13904 | 1531 |
| Clostridium_XlVa | Ascusb_13921 | 1532 |
| Victivallis | Ascusb_13923 | 1533 |
| Bacteroides | Ascusb_13940 | 1534 |
| Acidobacteria | Ascusb_13951 | 1535 |
| Clostridium_XlVa | Ascusb_13953 | 1536 |
| Prevotella | Ascusb_13954 | 1537 |
| Verrucomicrobia | Ascusb_13955 | 1538 |
| Clostridium_XlVa | Ascusb_13981 | 1539 |
| Treponema | Ascusb_13982 | 1540 |
| Pyramidobacter | Ascusb_13983 | 1541 |
| Robinsoniella | Ascusb_13992 | 1542 |
| Lachnospiracea_incertae_sedis | Ascusb_13995 | 1543 |
| Clostridium_XI | Ascusb_13996 | 1544 |
| Bifidobacterium | Ascusb_14005 | 1545 |
| Bacteroides | Ascusb_14013 | 1546 |
| Gordonibacter | Ascusb_14016 | 1547 |
| Enterorhabdus | Ascusb_14055 | 1548 |
| Lactobacillus | Ascusb_14059 | 1549 |
| Bacteroides | Ascusb_14074 | 1550 |
| Prevotella | Ascusb_14086 | 1551 |
| Tannerella | Ascusb_14141 | 1552 |
| Bacteroides | Ascusb_14145 | 1553 |
| Prevotella | Ascusb_14151 | 1554 |
| Clostridium_XlVb | Ascusb_14163 | 1555 |
| Gelidibacter | Ascusb_14189 | 1556 |
| Cyanobacteria | Ascusb_14213 | 1557 |
| Rhodoplanes | Ascusb_14224 | 1558 |
| Selenomonas | Ascusb_14226 | 1559 |
| Escherichia/Shigella | Ascusb_14256 | 1560 |
| Rikenella | Ascusb_14278 | 1561 |
| Coprococcus | Ascusb_14285 | 1562 |
| Clostridium_{—}sensu_{—}stricto | Ascusb_14290 | 1563 |
| Hyphomicrobium | Ascusb_14304 | 1564 |
| Erysipelotrichaceae_incertae_sedis | Ascusb_14320 | 1565 |
| Verrucomicrobia | Ascusb_14324 | 1566 |
| Staphylococcus | Ascusb_14335 | 1567 |
| Verrucomicrobia | Ascusb_14358 | 1568 |
| Victivallis | Ascusb_14359 | 1569 |
| Selenomonas | Ascusb_14423 | 1570 |
| Desulfobulbus | Ascusb_14425 | 1571 |
| Clostridium_III | Ascusb_14450 | 1572 |
| Spirochaeta | Ascusb_14451 | 1573 |
| Kordia | Ascusb_14514 | 1574 |
| Bosea | Ascusb_14521 | 1575 |
| Enterococcus | Ascusb_14525 | 1576 |
| Clostridium_III | Ascusb_14530 | 1577 |
| Xanthobacter | Ascusb_14538 | 1578 |
| Lactobacillus | Ascusb_14555 | 1579 |
| Prevotella | Ascusb_14583 | 1580 |
| Acidaminococcus | Ascusb_14595 | 1581 |
| Eubacterium | Ascusb_14596 | 1582 |
| Bacteroides | Ascusb_14611 | 1583 |
| Clostridium_XlVa | Ascusb_14613 | 1584 |
| Lactobacillus | Ascusb_14626 | 1585 |
| Devosia | Ascusb_14628 | 1586 |
| Pedobacter | Ascusb_14667 | 1587 |
| Clostridium_IV | Ascusb_14747 | 1588 |
| Clostridium_XlVa | Ascusb_14785 | 1589 |
| Corynebacterium | Ascusb_14790 | 1590 |
| Spirochaeta | Ascusb_14792 | 1591 |
| Anaeroplasma | Ascusb_14828 | 1592 |
| Clostridium_XlVa | Ascusb_14869 | 1593 |
| Lachnospiracea_incertae_sedis | Ascusb_14888 | 1594 |
| Saccharofermentans | Ascusb_14898 | 1595 |
| Slackia | Ascusb_14906 | 1596 |
| Limibacter | Ascusb_14951 | 1597 |
| Sphingobium | Ascusb_14952 | 1598 |
| Clostridium_XlVa | Ascusb_14987 | 1599 |
| Riemerella | Ascusb_14990 | 1600 |
| Saccharofermentans | Ascusb_15032 | 1601 |
| Bacteroides | Ascusb_15048 | 1602 |
| Prevotella | Ascusb_15076 | 1603 |
| Selenomonas | Ascusb_15097 | 1604 |
| Victivallis | Ascusb_15122 | 1605 |
| Howardella | Ascusb_15128 | 1606 |
| Pelospora | Ascusb_15132 | 1607 |
| Clostridium_{—}sensu_{—}stricto | Ascusb_15151 | 1608 |
| Selenomonas | Ascusb_15156 | 1609 |
| Fibrobacter | Ascusb_15181 | 1610 |
| Clostridium_III | Ascusb_15215 | 1611 |
| Sphingomonas | Ascusb_15220 | 1612 |
| Selenomonas | Ascusb_15226 | 1613 |
| Eggerthella | Ascusb_15326 | 1614 |
| Treponema | Ascusb_15352 | 1615 |
| Mogibacterium | Ascusb_15357 | 1616 |
| Adlercreutzia | Ascusb_15390 | 1617 |
| Selenomonas | Ascusb_15394 | 1618 |
| Methylomicrobium | Ascusb_15404 | 1619 |
| Leuconostoc | Ascusb_15413 | 1620 |
| Pyramidobacter | Ascusb_15427 | 1621 |
| Butyrivibrio | Ascusb_15438 | 1622 |
| Bacteroides | Ascusb_15454 | 1623 |
| Butyricimonas | Ascusb_15455 | 1624 |
| Ruminococcus | Ascusb_15461 | 1625 |
| Clostridium_{—}sensu_{—}stricto | Ascusb_15482 | 1626 |
| Butyrivibrio | Ascusb_15488 | 1627 |
| Corynebacterium | Ascusb_15494 | 1628 |
| Proteiniborus | Ascusb_15526 | 1629 |
| Spirochaeta | Ascusb_15539 | 1630 |
| Acetitomaculum | Ascusb_15549 | 1631 |
| Selenomonas | Ascusb_15552 | 1632 |
| Altererythrobacter | Ascusb_15556 | 1633 |
| Atopobium | Ascusb_15587 | 1634 |
| Clostridium_IV | Ascusb_15615 | 1635 |
| Clostridium_XlVa | Ascusb_15624 | 1636 |
| Clostridium_XlVa | Ascusb_15695 | 1637 |
| Clostridium_IV | Ascusb_15703 | 1638 |
| Clostridium_III | Ascusb_15720 | 1639 |
| Candidate phylum TM7 | Ascusb_15737 | 1640 |
| Desulfotomaculum | Ascusb_15741 | 1641 |
| Pedobacter | Ascusb_15746 | 1642 |
| Bacteroides | Ascusb_15750 | 1643 |
| Asaccharobacter | Ascusb_15754 | 1644 |
| Microbacterium | Ascusb_15768 | 1645 |
| Treponema | Ascusb_15824 | 1646 |
| Dethiosulfovibrio | Ascusb_15830 | 1647 |
| Oscillibacter | Ascusb_15832 | 1648 |
| Selenomonas | Ascusb_15846 | 1649 |
| Eubacterium | Ascusb_15864 | 1650 |
| Ruminococcus | Ascusb_15877 | 1651 |
| Treponema | Ascusb_15915 | 1652 |
| Spirochaeta | Ascusb_15951 | 1653 |
| Roseburia | Ascusb_15963 | 1654 |
| Ruminococcus | Ascusb_15992 | 1655 |
| Butyricimonas | Ascusb_16010 | 1656 |
| Pedobacter | Ascusb_16051 | 1657 |
| Spirochaeta | Ascusb_16066 | 1658 |
| Parabacteroides | Ascusb_16101 | 1659 |
| Methylococcus | Ascusb_16111 | 1660 |
| Enterorhabdus | Ascusb_16113 | 1661 |
| Clostridium_{—}sensu_{—}stricto | Ascusb_16124 | 1662 |
| Gelidibacter | Ascusb_16149 | 1663 |
| Sporobacter | Ascusb_16168 | 1664 |
| Pedobacter | Ascusb_16185 | 1665 |
| Cyanobacteria | Ascusb_16194 | 1666 |
| Syntrophococcus | Ascusb_16198 | 1667 |
| Slackia | Ascusb_16200 | 1668 |
| Mogibacterium | Ascusb_16215 | 1669 |
| Prevotella | Ascusb_16239 | 1670 |
| Pseudoflavonifractor | Ascusb_16244 | 1671 |
| Veillonella | Ascusb_16257 | 1672 |
| Clostridium_XlVa | Ascusb_16278 | 1673 |
| Bacillus | Ascusb_16299 | 1674 |
| Pedobacter | Ascusb_16316 | 1675 |
| Clostridium_IV | Ascusb_16329 | 1676 |
| Fibrobacter | Ascusb_16330 | 1677 |
| Paenibacillus | Ascusb_16336 | 1678 |
| Brevundimonas | Ascusb_16345 | 1679 |
| Desulfovibrio | Ascusb_16373 | 1680 |
| Clostridium_XI | Ascusb_16374 | 1681 |
| Helicobacter | Ascusb_16383 | 1682 |
| Prevotella | Ascusb_16420 | 1683 |
| Clostridium_XlVa | Ascusb_16423 | 1684 |
| Prevotella | Ascusb_16436 | 1685 |
| Herbiconiux | Ascusb_16453 | 1686 |
| Clostridium_IV | Ascusb_16461 | 1687 |
| Rikenella | Ascusb_16470 | 1688 |
| Clostridium_XlVa | Ascusb_16473 | 1689 |
| Hippea | Ascusb_16536 | 1690 |
| Lactobacillus | Ascusb_16537 | 1691 |
| Eubacterium | Ascusb_16541 | 1692 |
| Clostridium_IV | Ascusb_16546 | 1693 |
| Clostridium_III | Ascusb_16560 | 1694 |
| Lactobacillus | Ascusb_16565 | 1695 |
| Lactobacillus | Ascusb_16574 | 1696 |
| Desulfotomaculum | Ascusb_16578 | 1697 |
| Prevotella | Ascusb_16618 | 1698 |
| Staphylococcus | Ascusb_16628 | 1699 |
| Tenacibaculum | Ascusb_16632 | 1700 |
| Parabacteroides | Ascusb_16655 | 1701 |
| Clostridium_XlVa | Ascusb_16668 | 1702 |
| Clostridium_IV | Ascusb_16671 | 1703 |
| Clostridium_IV | Ascusb_16674 | 1704 |
| Pedobacter | Ascusb_16682 | 1705 |
| Helicobacter | Ascusb_16686 | 1706 |
| Proteiniclasticum | Ascusb_16691 | 1707 |
| Anaplasma | Ascusb_16711 | 1708 |
| Bacteroides | Ascusb_16734 | 1709 |
| Clostridium_IV | Ascusb_16749 | 1710 |
| Mucilaginibacter | Ascusb_16803 | 1711 |
| Verrucomicrobia | Ascusb_16829 | 1712 |
| Selenomonas | Ascusb_16884 | 1713 |
| Parabacteroides | Ascusb_16931 | 1714 |
| Eubacterium | Ascusb_16933 | 1715 |
| Coprococcus | Ascusb_16948 | 1716 |
| Weissella | Ascusb_16968 | 1717 |
| Pedobacter | Ascusb_16992 | 1718 |
| Clostridium_XI | Ascusb_16995 | 1719 |
| Sphingomonas | Ascusb_16998 | 1720 |
| Treponema | Ascusb_17013 | 1721 |
| Geobacter | Ascusb_17017 | 1722 |
| Clostridium_XlVa | Ascusb_17018 | 1723 |
| Filomicrobium | Ascusb_17036 | 1724 |
| Prevotella | Ascusb_17038 | 1725 |
| Pedobacter | Ascusb_17057 | 1726 |
| Pedobacter | Ascusb_17058 | 1727 |
| Clostridium_XlVa | Ascusb_17064 | 1728 |
| Bifidobacterium | Ascusb_17066 | 1729 |
| Saccharofermentans | Ascusb_17092 | 1730 |
| Ruminococcus | Ascusb_17136 | 1731 |
| Flavobacterium | Ascusb_17138 | 1732 |
| Rhodopirellula | Ascusb_17161 | 1733 |
| Roseburia | Ascusb_17171 | 1734 |
| Prevotella | Ascusb_17177 | 1735 |
| Limibacter | Ascusb_17182 | 1736 |
| Saccharofermentans | Ascusb_17203 | 1737 |
| Clostridium_{—}sensu_{—}stricto | Ascusb_17206 | 1738 |
| Clostridium_III | Ascusb_17243 | 1739 |
| Prevotella | Ascusb_17275 | 1740 |
| Pseudoxanthomonas | Ascusb_17283 | 1741 |
| Anaerorhabdus | Ascusb_17325 | 1742 |
| Clostridium_III | Ascusb_17360 | 1743 |
| Streptomyces | Ascusb_17372 | 1744 |
| Pedobacter | Ascusb_17388 | 1745 |
| Cellulomonas | Ascusb_17414 | 1746 |
| Clostridium_XlVa | Ascusb_17416 | 1747 |
| Olivibacter | Ascusb_17425 | 1748 |
| Treponema | Ascusb_17433 | 1749 |
| Gelidibacter | Ascusb_17437 | 1750 |
| Ruminococcus | Ascusb_17439 | 1751 |
| Clostridium_IV | Ascusb_17446 | 1752 |
| Gemmatimonas | Ascusb_17450 | 1753 |
| Prevotella | Ascusb_17459 | 1754 |
| Ethanoligenens | Ascusb_17477 | 1755 |
| Leucobacter | Ascusb_17494 | 1756 |
| Clostridium_XlVa | Ascusb_17502 | 1757 |
| Clostridium_XlVa | Ascusb_17507 | 1758 |
| Eggerthella | Ascusb_17540 | 1759 |
| Prevotella | Ascusb_17553 | 1760 |
| Prevotella | Ascusb_17569 | 1761 |
| Solobacterium | Ascusb_17571 | 1762 |
| Xanthobacter | Ascusb_17581 | 1763 |
| Verrucomicrobia | Ascusb_17649 | 1764 |
| Desulfovibrio | Ascusb_17670 | 1765 |
| Microbacterium | Ascusb_17717 | 1766 |
| Oscillibacter | Ascusb_17718 | 1767 |
| Blautia | Ascusb_17735 | 1768 |
| Papillibacter | Ascusb_17736 | 1769 |
| Prevotella | Ascusb_17759 | 1770 |
| Lentisphaera | Ascusb_17766 | 1771 |
| Ruminococcus | Ascusb_17767 | 1772 |
| Bacteroides | Ascusb_17769 | 1773 |
| Catonella | Ascusb_17771 | 1774 |
| Clostridium_XlVa | Ascusb_17773 | 1775 |
| Clostridium_IV | Ascusb_17782 | 1776 |
| Verrucomicrobia | Ascusb_17802 | 1777 |
| Clostridium_XI | Ascusb_17804 | 1778 |
| Prevotella | Ascusb_17810 | 1779 |
| Candidate phylum TM7 | Ascusb_17824 | 1780 |
| Mogibacterium | Ascusb_17838 | 1781 |
| Clostridium_XlVa | Ascusb_17846 | 1782 |
| Ruminococcus | Ascusb_17857 | 1783 |
| Eubacterium | Ascusb_17866 | 1784 |
| Clostridium_IV | Ascusb_17892 | 1785 |
| Rhodomicrobium | Ascusb_17896 | 1786 |
| Butyricicoccus | Ascusb_17957 | 1787 |
| Saccharofermentans | Ascusb_17975 | 1788 |
| Prevotella | Ascusb_17978 | 1789 |
| Mannheimia | Ascusb_17981 | 1790 |
| Lactobacillus | Ascusb_18078 | 1791 |
| Clostridium_IV | Ascusb_18081 | 1792 |
| Clostridium_IV | Ascusb_18091 | 1793 |
| Adlercreutzia | Ascusb_18107 | 1794 |
| Selenomonas | Ascusb_18110 | 1795 |
| Paenibacillus | Ascusb_18123 | 1796 |
| Clostridium_IV | Ascusb_18140 | 1797 |
| Paenibacillus | Ascusb_18148 | 1798 |
| Butyricimonas | Ascusb_18161 | 1799 |
| Wandonia | Ascusb_18170 | 1800 |
| Puniceicoccus | Ascusb_18179 | 1801 |
| Lactonifactor | Ascusb_18183 | 1802 |
| Selenomonas | Ascusb_18248 | 1803 |
| Brevundimonas | Ascusb_18262 | 1804 |
| Prevotella | Ascusb_18273 | 1805 |
| Gelidibacter | Ascusb_18283 | 1806 |
| Mogibacterium | Ascusb_18287 | 1807 |
| Clostridium_XlVa | Ascusb_18303 | 1808 |
| Coprococcus | Ascusb_18329 | 1809 |
| Verrucomicrobia | Ascusb_18335 | 1810 |
| Barnesiella | Ascusb_18339 | 1811 |
| Verrucomicrobia | Ascusb_18351 | 1812 |
| Clostridium_XlVa | Ascusb_18354 | 1813 |
| Anaerovorax | Ascusb_18371 | 1814 |
| Bacteroides | Ascusb_18389 | 1815 |
| Parasporobacterium | Ascusb_18444 | 1816 |
| Prevotella | Ascusb_18449 | 1817 |
| Parapedobacter | Ascusb_18475 | 1818 |
| Streptomyces | Ascusb_18495 | 1819 |
| Candidate phylum TM7 | Ascusb_18503 | 1820 |
| Thermotalea | Ascusb_18516 | 1821 |
| Alkaliflexus | Ascusb_18519 | 1822 |
| Oscillibacter | Ascusb_18557 | 1823 |
| Anaerotruncus | Ascusb_18564 | 1824 |
| Spirochaeta | Ascusb_18566 | 1825 |
| Clostridium_XI | Ascusb_18567 | 1826 |
| Sporotomaculum | Ascusb_18585 | 1827 |
| Sporacetigenium | Ascusb_18592 | 1828 |
| Bulleidia | Ascusb_18608 | 1829 |
| Clostridium_IV | Ascusb_18636 | 1830 |
| Syntrophomonas | Ascusb_18648 | 1831 |
| Desulfatiferula | Ascusb_18678 | 1832 |
| Hydrogenoanaerobacterium | Ascusb_18680 | 1833 |
| Clostridium_XlVa | Ascusb_18695 | 1834 |
| Mogibacterium | Ascusb_18731 | 1835 |
| Spirochaeta | Ascusb_18733 | 1836 |
| Prevotella | Ascusb_18735 | 1837 |
| Treponema | Ascusb_18738 | 1838 |
| Spiroplasma | Ascusb_18764 | 1839 |
| Clostridium_XlVa | Ascusb_18766 | 1840 |
| Bacteroides | Ascusb_18795 | 1841 |
| Treponema | Ascusb_18814 | 1842 |
| Selenomonas | Ascusb_18829 | 1843 |
| Butyricicoccus | Ascusb_18846 | 1844 |
| Gelidibacter | Ascusb_18866 | 1845 |
| Acetitomaculum | Ascusb_18876 | 1846 |
| Proteiniclasticum | Ascusb_18907 | 1847 |
| Papillibacter | Ascusb_18930 | 1848 |
| Prevotella | Ascusb_18949 | 1849 |
| Elusimicrobium | Ascusb_18970 | 1850 |
| Lachnospiracea_incertae_sedis | Ascusb_18998 | 1851 |
| Devosia | Ascusb_19006 | 1852 |
| Roseburia | Ascusb_19052 | 1853 |
| Mucilaginibacter | Ascusb_19054 | 1854 |
| Mogibacterium | Ascusb_19056 | 1855 |
| Saccharofermentans | Ascusb_19063 | 1856 |
| Paenibacillus | Ascusb_19092 | 1857 |
| Anaerotruncus | Ascusb_19101 | 1858 |
| Leucobacter | Ascusb_19114 | 1859 |
| Clostridium_XlVa | Ascusb_19148 | 1860 |
| Eubacterium | Ascusb_19160 | 1861 |
| Beijerinckia | Ascusb_19170 | 1862 |
| Prevotella | Ascusb_19200 | 1863 |
| Clostridium_III | Ascusb_19206 | 1864 |
| Cyanobacteria | Ascusb_19219 | 1865 |
| Pseudoflavonifractor | Ascusb_19237 | 1866 |
| Butyrivibrio | Ascusb_19245 | 1867 |
| Acholeplasma | Ascusb_19267 | 1868 |
| Filomicrobium | Ascusb_19288 | 1869 |
| Clostridium_III | Ascusb_19335 | 1870 |
| Pseudoflavonifractor | Ascusb_19340 | 1871 |
| Anaerophaga | Ascusb_19341 | 1872 |
| Lachnospiracea_incertae_sedis | Ascusb_19347 | 1873 |
| Asaccharobacter | Ascusb_19353 | 1874 |
| Kordia | Ascusb_19371 | 1875 |
| Ruminococcus | Ascusb_19376 | 1876 |
| Clostridium_III | Ascusb_19379 | 1877 |
| Ethanoligenens | Ascusb_19392 | 1878 |
| Clostridium_XlVa | Ascusb_19412 | 1879 |
| Barnesiella | Ascusb_19414 | 1880 |
| Eubacterium | Ascusb_19444 | 1881 |
| Prevotella | Ascusb_19457 | 1882 |
| Anaerophaga | Ascusb_19496 | 1883 |
| Acetitomaculum | Ascusb_19498 | 1884 |
| Prevotella | Ascusb_19503 | 1885 |
| Clostridium_III | Ascusb_19507 | 1886 |
| Marinoscillum | Ascusb_19558 | 1887 |
| Pedobacter | Ascusb_19568 | 1888 |
| Prevotella | Ascusb_19579 | 1889 |
| Prevotella | Ascusb_19613 | 1890 |
| Anaerovorax | Ascusb_19633 | 1891 |
| Clostridium_XlVa | Ascusb_19658 | 1892 |
| Clostridium_IV | Ascusb_19662 | 1893 |
| Lachnospiracea_incertae_sedis | Ascusb_19681 | 1894 |
| Clostridium_{—}sensu_{—}stricto | Ascusb_19694 | 1895 |
| Lishizhenia | Ascusb_19698 | 1896 |
| Pedobacter | Ascusb_19700 | 1897 |
| Howardella | Ascusb_19731 | 1898 |
| Roseburia | Ascusb_19745 | 1899 |
| Clostridium_XlVa | Ascusb_19754 | 1900 |
| Anaerovorax | Ascusb_19765 | 1901 |
| Lentisphaera | Ascusb_19772 | 1902 |
| Prevotella | Ascusb_19778 | 1903 |
| Saccharofermentans | Ascusb_19779 | 1904 |
| Cyanobacteria | Ascusb_19818 | 1905 |
| Proteiniphilum | Ascusb_19824 | 1906 |
| Schwartzia | Ascusb_19855 | 1907 |
| Anaerorhabdus | Ascusb_19884 | 1908 |
| Robinsoniella | Ascusb_19885 | 1909 |
| Clostridium_IV | Ascusb_19904 | 1910 |
| Erysipelotrichaceae_incertae_sedis | Ascusb_19936 | 1911 |
| Flavobacterium | Ascusb_19950 | 1912 |
| Pedobacter | Ascusb_19955 | 1913 |
| Clostridium_III | Ascusb_19982 | 1914 |
| Selenomonas | Ascusb_20001 | 1915 |
| Rhizobium | Ascusb_20027 | 1916 |
| Victivallis | Ascusb_20044 | 1917 |
| Butyricimonas | Ascusb_20062 | 1918 |
| Parabacteroides | Ascusb_20064 | 1919 |
| Adhaeribacter | Ascusb_20067 | 1920 |
| Eubacterium | Ascusb_20086 | 1921 |
| Acidobacteria | Ascusb_20100 | 1922 |
| Treponema | Ascusb_20104 | 1923 |
| Clostridium_XlVa | Ascusb_20108 | 1924 |
| Clostridium_XlVa | Ascusb_20135 | 1925 |
| Schwartzia | Ascusb_20143 | 1926 |
| Prevotella | Ascusb_20162 | 1927 |
| Selenomonas | Ascusb_20172 | 1928 |
| Beijerinckia | Ascusb_20219 | 1929 |
| Eubacterium | Ascusb_20221 | 1930 |
| Adhaeribacter | Ascusb_20251 | 1931 |
| Verrucomicrobia | Ascusb_20264 | 1932 |
| Desulfobulbus | Ascusb_20275 | 1933 |
| Bacteroides | Ascusb_20278 | 1934 |
| Rummeliibacillus | Ascusb_20291 | 1935 |
| Agarivorans | Ascusb_20293 | 1936 |
| Clostridium_XlVa | Ascusb_20306 | 1937 |
| Selenomonas | Ascusb_20312 | 1938 |
| Verrucomicrobia | Ascusb_20365 | 1939 |
| Prevotella | Ascusb_20368 | 1940 |
| Spirochaeta | Ascusb_20392 | 1941 |
| Selenomonas | Ascusb_20405 | 1942 |
| Spiroplasma | Ascusb_20424 | 1943 |
| Pedobacter | Ascusb_20440 | 1944 |
| Clostridium_XlVa | Ascusb_20449 | 1945 |
| Cyanobacteria | Ascusb_20456 | 1946 |
| Lactobacillus | Ascusb_20463 | 1947 |
| Clostridium_XlVa | Ascusb_20529 | 1948 |
| Prevotella | Ascusb_20534 | 1949 |
| Prevotella | Ascusb_20540 | 1950 |
| Marinobacter | Ascusb_20569 | 1951 |
| Butyricimonas | Ascusb_20576 | 1952 |
| Prevotella | Ascusb_20594 | 1953 |
| Dongia | Ascusb_20595 | 1954 |
| Anaerovorax | Ascusb_20639 | 1955 |
| Butyricimonas | Ascusb_20757 | 1956 |
| Cryptanaerobacter | Ascusb_20826 | 1957 |
| Papillibacter | Ascusb_20904 | 1958 |
| Clostridium_{—}sensu_{—}stricto | Ascusb_20938 | 1959 |
| Escherichia/Shigella | Ascusb_20943 | 1960 |
| Butyricicoccus | Ascusb_20986 | 1961 |
| Prevotella | Ascusb_21013 | 1962 |
| Lachnospiracea_incertae_sedis | Ascusb_21027 | 1963 |
| Thermotalea | Ascusb_21035 | 1964 |
| Cohaesibacter | Ascusb_21042 | 1965 |
| Clostridium_XVIII | Ascusb_21043 | 1966 |
| Lachnospiracea_incertae_sedis | Ascusb_21085 | 1967 |
| Spirochaeta | Ascusb_21095 | 1968 |
| Clostridium_XlVa | Ascusb_21112 | 1969 |
| Hydrogenoanaerobacterium | Ascusb_21147 | 1970 |
| Clostridium_IV | Ascusb_21151 | 1971 |
| Papillibacter | Ascusb_21160 | 1972 |
| Sporosarcina | Ascusb_21190 | 1973 |
| Selenomonas | Ascusb_21219 | 1974 |
| Papillibacter | Ascusb_21229 | 1975 |
| Lachnospiracea_incertae_sedis | Ascusb_21244 | 1976 |
| Clostridium_XlVa | Ascusb_21271 | 1977 |
| Saccharofermentans | Ascusb_21297 | 1978 |
| Clostridium_IV | Ascusb_21309 | 1979 |
| Lachnospiracea_incertae_sedis | Ascusb_21348 | 1980 |
| Clostridium_IV | Ascusb_21425 | 1981 |
| Lachnospiracea_incertae_sedis | Ascusb_21436 | 1982 |
| Desulfotomaculum | Ascusb_21466 | 1983 |
| Pedobacter | Ascusb_21484 | 1984 |
| Anaeroplasma | Ascusb_21546 | 1985 |
| Clostridium_IV | Ascusb_21585 | 1986 |
| Treponema | Ascusb_21595 | 1987 |
| Mogibacterium | Ascusb_21601 | 1988 |

TABLE 4
Budapest Treaty Deposits of the Disclosure

| Depository | Accession Number | Date of Deposit |
|---|---|---|
| NRRL | NRRL Y-67249 | Apr. 27, 2016 |
| NRRL | NRRL B-67248 | Apr. 27, 2016 |
| NRRL | NRRL B-67347 | Dec. 15, 2016 |
| NRRL | NRRL B-67348 | Dec. 15, 2016 |
| NRRL | NRRL B-67349 | Dec. 15, 2016 |
| Bigelow | PATENT201612001 | Dec. 12, 2016 |
| Bigelow | PATENT201612002 | Dec. 12, 2016 |
| Bigelow | PATENT201612003 | Dec. 12, 2016 |
| Bigelow | PATENT201612004 | Dec. 12, 2016 |
| Bigelow | PATENT201612005 | Dec. 12, 2016 |
| Bigelow | PATENT201612006 | Dec. 12, 2016 |
| Bigelow | PATENT201612007 | Dec. 15, 2016 |
| Bigelow | PATENT201612008 | Dec. 15, 2016 |
| Bigelow | PATENT201612009 | Dec. 15, 2016 |
| Bigelow | PATENT201612010 | Dec. 15, 2016 |
| Bigelow | PATENT201612011 | Dec. 15, 2016 |
| Bigelow | PATENT201612012 | Dec. 15, 2016 |
| Bigelow | PATENT201612013 | Dec. 19, 2016 |
| Bigelow | PATENT201612014 | Dec. 28, 2016 |
| ATCC | PTA-125917⁵ | May 7, 2019 |
| ATCC | TSD-225⁶ | Oct. 31, 2020 |
| NRRL | NRRL B-67764⁷ | Apr. 11, 2019 |
| NCTC | NCTC 14479⁸ | Jan. 21, 2021 |

⁵Deposit number applicable to Budapest treaty and/or type stain rules and procedures
⁶Deposit number applicable to Budapest treaty and/or type stain rules and procedures
⁷Deposit number applicable to Budapest treaty and/or type stain rules and procedures
⁸Deposit number applicable to Budapest treaty and/or type stain rules and procedures

### DETAILED DESCRIPTION

### Definitions

[0065] While the following terms are believed to be well understood by one of ordinary skill in the art, the following definitions are set forth to facilitate explanation of the presently disclosed subject matter.

[0066] The term “a” or “an” may refer to one or more of that entity, i.e. can refer to plural referents. As such, the terms “a” or “an”, “one or more” and “at least one” are used interchangeably herein. In addition, reference to “an element” by the indefinite article “a” or “an” does not exclude the possibility that more than one of the elements is present, unless the context clearly requires that there is one and only one of the elements.

[0067] Reference throughout this specification to “one embodiment”, “an embodiment”, “one aspect”, or “an aspect” means that a particular feature, structure or characteristic described in connection with the embodiment is included in at least one embodiment of the present disclosure. Thus, the appearances of the phrases “in one embodiment” or “in an embodiment” in various places throughout this specification are not necessarily all referring to the same embodiment. Furthermore, the particular features, structures, or characteristics can be combined in any suitable manner in one or more embodiments.

[0068] As used herein, in particular embodiments, the terms “about” or “approximately” when preceding a numerical value indicates the value plus or minus a range of 10%.

[0069] As used herein the terms “microorganism” or “microbe” should be taken broadly. These terms are used interchangeably and include, but are not limited to, the two prokaryotic domains, Bacteria and Archaea, eukaryotic fungi and protists, as well as viruses. In some embodiments, the disclosure refers to the “microbes” of Table 1 or Table 3, or the “microbes” incorporated by reference. This characterization can refer to not only the predicted taxonomic microbial identifiers of the table, but also the identified strains of the microbes listed in the table.

[0070] The term “microbial consortia” or “microbial consortium” refers to a subset of a microbial community of individual microbial species, or strains of a species, which can be described as carrying out a common function, or can be described as participating in, or leading to, or correlating with, a recognizable parameter, such as a phenotypic trait of interest (e.g. increased milk production in a ruminant). The community may comprise two or more species, or strains of a species, of microbes. In some instances, the microbes coexist within the community symbiotically.

[0071] The term “microbial community” means a group of microbes comprising two or more species or strains. Unlike microbial consortia, a microbial community does not have to be carrying out a common function, or does not have to be participating in, or leading to, or correlating with, a recognizable parameter, such as a phenotypic trait of interest (e.g. increased milk production in a ruminant).

[0072] As used herein, “isolate,” “isolated,” “isolated microbe,” and like terms, are intended to mean that the one or more microorganisms has been separated from at least one of the materials with which it is associated in a particular environment (for example soil, water, animal tissue).

[0073] Microbes of the present disclosure may include spores and/or vegetative cells. In some embodiments, microbes of the present disclosure include microbes in a viable but non-culturable (VBNC) state. See Liao and Zhao (US Publication US2015267163A1). In some embodiments, microbes of the present disclosure include microbes in a biofilm. See Merritt et al. (U.S. Pat. No. 7,427,408).

[0074] Thus, an “isolated microbe” does not exist in its naturally occurring environment; rather, it is through the various techniques described herein that the microbe has been removed from its natural setting and placed into a non-naturally occurring state of existence. Thus, the isolated strain or isolated microbe may exist as, for example, a biologically pure culture, or as spores (or other forms of the strain) in association with an acceptable carrier.

[0075] As used herein, “spore” or “spores” refer to structures produced by bacteria and fungi that are adapted for survival and dispersal. Spores are generally characterized as dormant structures, however spores are capable of differentiation through the process of germination. Germination is the differentiation of spores into vegetative cells that are capable of metabolic activity, growth, and reproduction. The germination of a single spore results in a single fungal or bacterial vegetative cell. Fungal spores are units of asexual reproduction, and in some cases are necessary structures in fungal life cycles. Bacterial spores are structures for surviving conditions that may ordinarily be nonconductive to the survival or growth of vegetative cells.

[0076] As used herein, “microbial composition” refers to a composition comprising one or more microbes of the present disclosure, wherein a microbial composition, in some embodiments, is administered to animals of the present disclosure.

[0077] As used herein, “carrier”, “acceptable carrier”, or “pharmaceutical carrier” refers to a diluent, adjuvant, excipient, or vehicle with which the compound is administered. Such carriers can be sterile liquids, such as water and oils, including those of petroleum, animal, vegetable, or synthetic origin; such as peanut oil, soybean oil, mineral oil, sesame oil, and the like. Water or aqueous solution saline solutions and aqueous dextrose and glycerol solutions are preferably employed as carriers, in some embodiments as injectable solutions. Alternatively, the carrier can be a solid dosage form carrier, including but not limited to one or more of a binder (for compressed pills), a glidant, an encapsulating agent, a flavorant, and a colorant. The choice of carrier can be selected with regard to the intended route of administration and standard pharmaceutical practice. See Hardee and Baggo (1998. Development and Formulation of Veterinary Dosage Forms. 2^{nd} Ed. CRC Press. 504 pg.); E.W. Martin (1970. Remington's Pharmaceutical Sciences. 17^{th} Ed. Mack Pub. Co.); and Blaser et al. (US Publication US20110280840A1).

[0078] In certain aspects of the disclosure, the isolated microbes exist as isolated and biologically pure cultures. It will be appreciated by one of skill in the art, that an isolated and biologically pure culture of a particular microbe, denotes that said culture is substantially free (within scientific reason) of other living organisms and contains only the individual microbe in question. The culture can contain varying concentrations of said microbe. The present disclosure notes that isolated and biologically pure microbes often “necessarily differ from less pure or impure materials.” See, e.g. In re Bergstrom, 427 F.2d 1394, (CCPA 1970) (discussing purified prostaglandins), see also, In re Bergy, 596 F.2d 952 (CCPA 1979) (discussing purified microbes), see also, Parke-Davis & Co. v. H.K. Mulford & Co., 189 F. 95 (S.D.N.Y. 1911) (Learned Hand discussing purified adrenaline), aff'd in part, rev'd in part, 196 F. 496 (2d Cir. 1912), each of which are incorporated herein by reference. Furthermore, in some aspects, the disclosure provides for certain quantitative measures of the concentration, or purity limitations, that must be found within an isolated and biologically pure microbial culture. The presence of these purity values, in certain embodiments, is a further attribute that distinguishes the presently disclosed microbes from those microbes existing in a natural state. See, e.g., Merck & Co. v. Olin Aathieson Chemical Corp., 253 F.2d 156 (4th Cir. 1958) (discussing purity limitations for vitamin B12 produced by microbes), incorporated herein by reference.

[0079] As used herein, “individual isolates” should be taken to mean a composition, or culture, comprising a predominance of a single genera, species, or strain, of microorganism, following separation from one or more other microorganisms. The phrase should not be taken to indicate the extent to which the microorganism has been isolated or purified. However, “individual isolates” can comprise substantially only one genus, species, or strain, of microorganism.

[0080] As used herein, “microbiome” refers to the collection of microorganisms that inhabit the digestive tract or gastrointestinal tract of an animal (including the rumen if said animal is a ruminant) and the microorgansims' physical environment (i.e. the microbiome has a biotic and physical component). The microbiome is fluid and may be modulated by numerous naturally occurring and artificial conditions (e.g., change in diet, disease, antimicrobial agents, influx of additional microorganisms, etc.). The modulation of the microbiome of a rumen that can be achieved via administration of the compositions of the disclosure, can take the form of: (a) increasing or decreasing a particular Family, Genus, Species, or functional grouping of microbe (i.e. alteration of the biotic component of the rumen microbiome) and/or (b) increasing or decreasing volatile fatty acids in the rumen, increasing or decreasing rumen pH, increasing or decreasing any other physical parameter important for rumen health (i.e. alteration of the abiotic component of the rumen microbiome).

[0081] As used herein, “probiotic” refers to a substantially pure microbe (i.e., a single isolate) or a mixture of desired microbes, and may also include any additional components that can be administered to a mammal for restoring microbiota. Probiotics or microbial inoculant compositions of the invention may be administered with an agent to allow the microbes to survive the environment of the gastrointestinal tract, i.e., to resist low pH and to grow in the gastrointestinal environment. In some embodiments, the present compositions (e.g., microbial compositions) are probiotics in some aspects.

[0082] As used herein, “prebiotic” refers to an agent that increases the number and/or activity of one or more desired microbes. Non-limiting examples of prebiotics that may be useful in the methods of the present disclosure include fructooligosaccharides (e.g., oligofructose, inulin, inulin-type fructans), galactooligosaccharides, amino acids, alcohols, and mixtures thereof. See Ramirez-Farias et al. (2008. Br. J. Nutr. 4:1-10) and Pool-Zobel and Sauer (2007. J. Nutr. 137:2580-2584 and supplemental).

[0083] The term “growth medium” as used herein, is any medium which is suitable to support growth of a microbe. By way of example, the media may be natural or artificial including gastrin supplemental agar, LB media, blood serum, and tissue culture gels. It should be appreciated that the media may be used alone or in combination with one or more other media. It may also be used with or without the addition of exogenous nutrients.

[0084] The medium may be amended or enriched with additional compounds or components, for example, a component which may assist in the interaction and/or selection of specific groups of microorganisms. For example, antibiotics (such as penicillin) or sterilants (for example, quaternary ammonium salts and oxidizing agents) could be present and/or the physical conditions (such as salinity, nutrients (for example organic and inorganic minerals (such as phosphorus, nitrogenous salts, ammonia, potassium and micronutrients such as cobalt and magnesium), pH, and/or temperature) could be amended.

[0085] As used herein, the term “ruminant” includes mammals that are capable of acquiring nutrients from plant-based food by fermenting it in a specialized stomach (rumen) prior to digestion, principally through microbial actions. Ruminants included cattle, goats, sheep, giraffes, yaks, deer, antelope, and others.

[0086] As used herein, the term “bovid” includes any member of family Bovidae, which include hoofed mammals such as antelope, sheep, goats, and cattle, among others.

[0087] As used herein, “energy-corrected milk” or “ECM” represents the amount of energy in milk based upon milk volume, milk fat, and milk protein. ECM adjusts the milk components to 3.5% fat and 3.2% protein, thus equalizing animal performance and allowing for comparison of production at the individual animal and herd levels over time. An equation used to calculate ECM, as related to the present disclosure, is:

ECM=(0.327×milk pounds)+(12.95×fat pounds)+(7.2×protein pounds)

[0088] As used herein, “improved” should be taken broadly to encompass improvement of a characteristic of interest, as compared to a control group, or as compared to a known average quantity associated with the characteristic in question. For example, “improved” milk production associated with application of a beneficial microbe, or consortia, of the disclosure can be demonstrated by comparing the milk produced by an ungulate treated by the microbes taught herein to the milk of an ungulate not treated. In the present disclosure, “improved” does not necessarily demand that the data be statistically significant (i.e. p<0.05); rather, any quantifiable difference demonstrating that one value (e.g. the average treatment value) is different from another (e.g. the average control value) can rise to the level of “improved.”

[0089] As used herein, “inhibiting and suppressing” and like terms should not be construed to require complete inhibition or suppression, although this may be desired in some embodiments.

[0090] The term “marker” or “unique marker” as used herein is an indicator of unique microorganism type, microorganism strain or activity of a microorganism strain. A marker can be measured in biological samples and includes without limitation, a nucleic acid-based marker such as a ribosomal RNA gene, a peptide- or protein-based marker, and/or a metabolite or other small molecule marker.

[0091] The term “metabolite” as used herein is an intermediate or product of metabolism. A metabolite in one embodiment is a small molecule. Metabolites have various functions, including in fuel, structural, signaling, stimulatory and inhibitory effects on enzymes, as a cofactor to an enzyme, in defense, and in interactions with other organisms (such as pigments, odorants and pheromones). A primary metabolite is directly involved in normal growth, development and reproduction. A secondary metabolite is not directly involved in these processes but usually has an important ecological function. Examples of metabolites include but are not limited to antibiotics and pigments such as resins and terpenes, etc. Some antibiotics use primary metabolites as precursors, such as actinomycin which is created from the primary metabolite, tryptophan. Metabolites, as used herein, include small, hydrophilic carbohydrates; large, hydrophobic lipids and complex natural compounds.

[0092] As used herein, the term “genotype” refers to the genetic makeup of an individual cell, cell culture, tissue, organism, or group of organisms.

[0093] As used herein, the term “allele(s)” means any of one or more alternative forms of a gene, all of which alleles relate to at least one trait or characteristic. In a diploid cell, the two alleles of a given gene occupy corresponding loci on a pair of homologous chromosomes. Since the present disclosure, in embodiments, relates to QTLs, i.e. genomic regions that may comprise one or more genes or regulatory sequences, it is in some instances more accurate to refer to “haplotype” (i.e. an allele of a chromosomal segment) instead of “allele”, however, in those instances, the term “allele” should be understood to comprise the term “haplotype”. Alleles are considered identical when they express a similar phenotype. Differences in sequence are possible but not important as long as they do not influence phenotype.

[0094] As used herein, the term “locus” (loci plural) means a specific place or places or a site on a chromosome where for example a gene or genetic marker is found.

[0095] As used herein, the term “genetically linked” refers to two or more traits that are co-inherited at a high rate during breeding such that they are difficult to separate through crossing.

[0096] A “recombination” or “recombination event” as used herein refers to a chromosomal crossing over or independent assortment. The term “recombinant” refers to an organism having a new genetic makeup arising as a result of a recombination event.

[0097] As used herein, the term “molecular marker” or “genetic marker” refers to an indicator that is used in methods for visualizing differences in characteristics of nucleic acid sequences. Examples of such indicators are restriction fragment length polymorphism (RFLP) markers, amplified fragment length polymorphism (AFLP) markers, single nucleotide polymorphisms (SNPs), insertion mutations, microsatellite markers (SSRs), sequence-characterized amplified regions (SCARs), cleaved amplified polymorphic sequence (CAPS) markers or isozyme markers or combinations of the markers described herein which defines a specific genetic and chromosomal location. Markers further include polynucleotide sequences encoding 16S or 18S rRNA, and internal transcribed spacer (ITS) sequences, which are sequences found between small-subunit and large-subunit rRNA genes that have proven to be especially useful in elucidating relationships or distinctions among when compared against one another. Mapping of molecular markers in the vicinity of an allele is a procedure which can be performed by the average person skilled in molecular-biological techniques.

[0098] The primary structure of major rRNA subunit 16S comprise a particular combination of conserved, variable, and hypervariable regions that evolve at different rates and enable the resolution of both very ancient lineages such as domains, and more modern lineages such as genera. The secondary structure of the 16S subunit include approximately 50 helices which result in base pairing of about 67% of the residues. These highly conserved secondary structural features are of great functional importance and can be used to ensure positional homology in multiple sequence alignments and phylogenetic analysis. Over the previous few decades, the 16S rRNA gene has become the most sequenced taxonomic marker and is the cornerstone for the current systematic classification of bacteria and archaea (Yarza et al. 2014. Nature Rev. Micro. 12:635-45).

[0099] A sequence identity of 94.5% or lower for two 16S rRNA genes is strong evidence for distinct genera, 86.5% or lower is strong evidence for distinct families, 82% or lower is strong evidence for distinct orders, 78.5% is strong evidence for distinct classes, and 75% or lower is strong evidence for distinct phyla. The comparative analysis of 16S rRNA gene sequences enables the establishment of taxonomic thresholds that are useful not only for the classification of cultured microorganisms but also for the classification of the many environmental sequences. Yarza et al. 2014. Nature Rev. Micro. 12:635-45).

[0100] As used herein, the term “trait” refers to a characteristic or phenotype. For example, in the context of some embodiments of the present disclosure, quantity of milk fat produced relates to the amount of triglycerides, triacylglycerides, diacylglycerides, monoacylglycerides, phospholipids, cholesterol, glycolipids, and fatty acids present in milk. Desirable traits may also include other milk characteristics, including but not limited to: predominance of short chain fatty acids, medium chain fatty acids, and long chain fatty acids; quantity of carbohydrates such as lactose, glucose, galactose, and other oligosaccharides; quantity of proteins such as caseins and whey; quantity of vitamins, minerals, milk yield/volume; reductions in methane emissions or manure; improved efficiency of nitrogen utilization; improved dry matter intake; improved feed efficiency and digestibility; increased degradation of cellulose, lignin, and hemicellulose; increased rumen concentrations of fatty acids such as acetic acid, propionic acid, and butyric acid; etc.

[0101] A trait may be inherited in a dominant or recessive manner, or in a partial or incomplete-dominant manner. A trait may be monogenic (i.e. determined by a single locus) or polygenic (i.e. determined by more than one locus) or may also result from the interaction of one or more genes with the environment.

[0102] In the context of this disclosure, traits may also result from the interaction of one or more mammalian genes and one or more microorganism genes.

[0103] As used herein, the term “homozygous” means a genetic condition existing when two identical alleles reside at a specific locus, but are positioned individually on corresponding pairs of homologous chromosomes in the cell of a diploid organism. Conversely, as used herein, the term “heterozygous” means a genetic condition existing when two different alleles reside at a specific locus, but are positioned individually on corresponding pairs of homologous chromosomes in the cell of a diploid organism.

[0104] As used herein, the term “phenotype” refers to the observable characteristics of an individual cell, cell culture, organism (e.g., a ruminant), or group of organisms which results from the interaction between that individual's genetic makeup (i.e., genotype) and the environment.

[0105] As used herein, the term “chimeric” or “recombinant” when describing a nucleic acid sequence or a protein sequence refers to a nucleic acid, or a protein sequence, that links at least two heterologous polynucleotides, or two heterologous polypeptides, into a single macromolecule, or that re-arranges one or more elements of at least one natural nucleic acid or protein sequence. For example, the term “recombinant” can refer to an artificial combination of two otherwise separated segments of sequence, e.g., by chemical synthesis or by the manipulation of isolated segments of nucleic acids by genetic engineering techniques.

[0106] As used herein, a “synthetic nucleotide sequence” or “synthetic polynucleotide sequence” is a nucleotide sequence that is not known to occur in nature or that is not naturally occurring. Generally, such a synthetic nucleotide sequence will comprise at least one nucleotide difference when compared to any other naturally occurring nucleotide sequence.

[0107] As used herein, the term “nucleic acid” refers to a polymeric form of nucleotides of any length, either ribonucleotides or deoxyribonucleotides, or analogs thereof. This term refers to the primary structure of the molecule, and thus includes double- and single-stranded DNA, as well as double- and single-stranded RNA. It also includes modified nucleic acids such as methylated and/or capped nucleic acids, nucleic acids containing modified bases, backbone modifications, and the like. The terms “nucleic acid” and “nucleotide sequence” are used interchangeably.

[0108] As used herein, the term “gene” refers to any segment of DNA associated with a biological function. Thus, genes include, but are not limited to, coding sequences and/or the regulatory sequences required for their expression. Genes can also include non-expressed DNA segments that, for example, form recognition sequences for other proteins. Genes can be obtained from a variety of sources, including cloning from a source of interest or synthesizing from known or predicted sequence information, and may include sequences designed to have desired parameters.

[0109] As used herein, the term “homologous” or “homologue” or “ortholog” is known in the art and refers to related sequences that share a common ancestor or family member and are determined based on the degree of sequence identity. The terms “homology,” “homologous,” “substantially similar” and “corresponding substantially” are used interchangeably herein. They refer to nucleic acid fragments wherein changes in one or more nucleotide bases do not affect the ability of the nucleic acid fragment to mediate gene expression or produce a certain phenotype. These terms also refer to modifications of the nucleic acid fragments of the instant disclosure such as deletion or insertion of one or more nucleotides that do not substantially alter the functional properties of the resulting nucleic acid fragment relative to the initial, unmodified fragment. It is therefore understood, as those skilled in the art will appreciate, that the disclosure encompasses more than the specific exemplary sequences. These terms describe the relationship between a gene found in one species, subspecies, variety, cultivar or strain and the corresponding or equivalent gene in another species, subspecies, variety, cultivar or strain. For purposes of this disclosure homologous sequences are compared. “Homologous sequences” or “homologues” or “orthologs” are thought, believed, or known to be functionally related. A functional relationship may be indicated in any one of a number of ways, including, but not limited to: (a) degree of sequence identity and/or (b) the same or similar biological function. Preferably, both (a) and (b) are indicated. Homology can be determined using software programs readily available in the art, such as those discussed in Current Protocols in Molecular Biology (F. M. Ausubel el al., eds., 1987) Supplement 30, section 7.718, Table 7.71. Some alignment programs are MacVector (Oxford Molecular Ltd, Oxford, U.K.), ALIGN Plus (Scientific and Educational Software, Pennsylvania) and AlignX (Vector NTi, Invitrogen, Carlsbad, Calif.). Another alignment program is Sequencher (Gene Codes, Ann Arbor, Mich.), using default parameters.

[0110] As used herein, the term “nucleotide change” refers to, e.g., nucleotide substitution, deletion, and/or insertion, as is well understood in the art. For example, mutations contain alterations that produce silent substitutions, additions, or deletions, but do not alter the properties or activities of the encoded protein or how the proteins are made.

[0111] As used herein, the term “protein modification” refers to, e.g., amino acid substitution, amino acid modification, deletion, and/or insertion, as is well understood in the art.

[0112] As used herein, the term “at least a portion” or “fragment” of a nucleic acid or polypeptide means a portion having the minimal size characteristics of such sequences, or any larger fragment of the full length molecule, up to and including the full length molecule. A fragment of a polynucleotide of the disclosure may encode a biologically active portion of a genetic regulatory element. A biologically active portion of a genetic regulatory element can be prepared by isolating a portion of one of the polynucleotides of the disclosure that comprises the genetic regulatory element and assessing activity as described herein. Similarly, a portion of a polypeptide may be 4 amino acids, 5 amino acids, 6 amino acids, 7 amino acids, and so on, going up to the full length polypeptide. The length of the portion to be used will depend on the particular application. A portion of a nucleic acid useful as a hybridization probe may be as short as 12 nucleotides; in some embodiments, it is 20 nucleotides. A portion of a polypeptide useful as an epitope may be as short as 4 amino acids. A portion of a polypeptide that performs the function of the full-length polypeptide would generally be longer than 4 amino acids.

[0113] Variant polynucleotides also encompass sequences derived from a mutagenic and recombinogenic procedure such as DNA shuffling. Strategies for such DNA shuffling are known in the art. See, for example, Stemmer (1994) PNAS 91:10747-10751; Stemmer (1994) Nature 370:389-391; Crameri et al. (1997) Nature Biotech. 15:436-438; Moore et al. (1997) J. Mol. Biol. 272:336-347; Zbang et al. (1997) PNAS 94:4504-4509; Crameri et al. (1998) Nature 391:288-291; and U.S. Pat. Nos. 5,605,793 and 5,837,458. For PCR amplifications of the polynucleotides disclosed herein, oligonucleotide primers can be designed for use in PCR reactions to amplify corresponding DNA sequences from cDNA or genomic DNA extracted from any organism of interest. Methods for designing PCR primers and PCR cloning are generally known in the art and are disclosed in Sambrook et al. (1989) Molecular Cloning: A Laboratory Manual (2nd ed., Cold Spring Harbor Laboratory Press, Plainview, N.Y.). See also Innis et al., eds. (1990) PCR Protocols: A Guide to Methods and Applications (Academic Press, New York); Innis and Gelfand, eds. (1995) PCR Strategies (Academic Press, New York); and Innis and Gelfand, eds. (1999) PCR Methods Manual (Academic Press, New York). Known methods of PCR include, but are not limited to, methods using paired primers, nested primers, single specific primers, degenerate primers, gene-specific primers, vector-specific primers, partially-mismatched primers, and the like.

[0114] The term “primer” as used herein refers to an oligonucleotide which is capable of annealing to the amplification target allowing a DNA polymerase to attach, thereby serving as a point of initiation of DNA synthesis when placed under conditions in which synthesis of primer extension product is induced, i.e., in the presence of nucleotides and an agent for polymerization such as DNA polymerase and at a suitable temperature and pH. The (amplification) primer is preferably single stranded for maximum efficiency in amplification. Preferably, the primer is an oligodeoxyribonucleotide. The primer must be sufficiently long to prime the synthesis of extension products in the presence of the agent for polymerization. The exact lengths of the primers will depend on many factors, including temperature and composition (A/T vs. G/C content) of primer. A pair of bi-directional primers consists of one forward and one reverse primer as commonly used in the art of DNA amplification such as in PCR amplification.

[0115] The terms “stringency” or “stringent hybridization conditions” refer to hybridization conditions that affect the stability of hybrids, e.g., temperature, salt concentration, pH, formamide concentration and the like. These conditions are empirically optimized to maximize specific binding and minimize non-specific binding of primer or probe to its target nucleic acid sequence. The terms as used include reference to conditions under which a probe or primer will hybridize to its target sequence, to a detectably greater degree than other sequences (e.g. at least 2-fold over background). Stringent conditions are sequence dependent and will be different in different circumstances. Longer sequences hybridize specifically at higher temperatures. Generally, stringent conditions are selected to be about 5° C. lower than the thermal melting point (Tm) for the specific sequence at a defined ionic strength and pH. The Tm is the temperature (under defined ionic strength and pH) at which 50% of a complementary target sequence hybridizes to a perfectly matched probe or primer. Typically, stringent conditions will be those in which the salt concentration is less than about 1.0 M Na+ ion, typically about 0.01 to 1.0 M Na+ ion concentration (or other salts) at pH 7.0 to 8.3 and the temperature is at least about 30° C. for short probes or primers (e.g. 10 to 50 nucleotides) and at least about 60° C. for long probes or primers (e.g. greater than 50 nucleotides). Stringent conditions may also be achieved with the addition of destabilizing agents such as formamide. Exemplary low stringent conditions or “conditions of reduced stringency” include hybridization with a buffer solution of 30% formamide, 1 M NaCl, 1% SDS at 37° C. and a wash in 2×SSC at 40° C. Exemplary high stringency conditions include hybridization in 50% formamide, 1M NaCl, 1% SDS at 37° C., and a wash in 0.1×SSC at 60° C. Hybridization procedures are well known in the art and are described by e.g. Ausubel et al., 1998 and Sambrook et al., 2001. In some embodiments, stringent conditions are hybridization in 0.25 M Na2HPO4 buffer (pH 7.2) containing 1 mM Na2EDTA, 0.5-20% sodium dodecyl sulfate at 45° C., such as 0.5%, 1%, 2%, 3%, 4%, 5%, 6%, 7%, 8%, 9%, 10%, 11%, 12%, 13%, 14%, 15%, 16%, 17%, 18%, 19% or 20%, followed by a wash in 5-SSC, containing 0.1% (w/v) sodium dodecyl sulfate, at 55° C. to 65° C.

[0116] As used herein, “promoter” refers to a DNA sequence capable of controlling the expression of a coding sequence or functional RNA. The promoter sequence consists of proximal and more distal upstream elements, the latter elements often referred to as enhancers. Accordingly, an “enhancer” is a DNA sequence that can stimulate promoter activity, and may be an innate element of the promoter or a heterologous element inserted to enhance the level or tissue specificity of a promoter. Promoters may be derived in their entirety from a native gene, or be composed of different elements derived from different promoters found in nature, or even comprise synthetic DNA segments. It is understood by those skilled in the art that different promoters may direct the expression of a gene in different tissues or cell types, or at different stages of development, or in response to different environmental conditions. It is further recognized that since in most cases the exact boundaries of regulatory sequences have not been completely defined, DNA fragments of some variation may have identical promoter activity.

[0117] As used herein, a “constitutive promoter” is a promoter which is active under most conditions and/or during most development stages. There are several advantages to using constitutive promoters in expression vectors used in biotechnology, such as: high level of production of proteins used to select transgenic cells or organisms; high level of expression of reporter proteins or scorable markers, allowing easy detection and quantification; high level of production of a transcription factor that is part of a regulatory transcription system; production of compounds that requires ubiquitous activity in the organism; and production of compounds that are required during all stages of development. Non-limiting exemplary constitutive promoters include, CaMV 35S promoter, opine promoters, ubiquitin promoter, alcohol dehydrogenase promoter, etc.

[0118] As used herein, a “non-constitutive promoter” is a promoter which is active under certain conditions, in certain types of cells, and/or during certain development stages. For example, tissue specific, tissue preferred, cell type specific, cell type preferred, inducible promoters, and promoters under development control are non-constitutive promoters. Examples of promoters under developmental control include promoters that preferentially initiate transcription in certain tissues.

[0119] As used herein, “inducible” or “repressible” promoter is a promoter which is under chemical or environmental factors control. Examples of environmental conditions that may affect transcription by inducible promoters include anaerobic conditions, certain chemicals, the presence of light, acidic or basic conditions, etc.

[0120] As used herein, a “tissue specific” promoter is a promoter that initiates transcription only in certain tissues. Unlike constitutive expression of genes, tissue-specific expression is the result of several interacting levels of gene regulation. As such, in the art sometimes it is preferable to use promoters from homologous or closely related species to achieve efficient and reliable expression of transgenes in particular tissues. This is one of the main reasons for the large amount of tissue-specific promoters isolated from particular tissues found in both scientific and patent literature.

[0121] As used herein, the term “operably linked” refers to the association of nucleic acid sequences on a single nucleic acid fragment so that the function of one is regulated by the other. For example, a promoter is operably linked with a coding sequence when it is capable of regulating the expression of that coding sequence (i.e., that the coding sequence is under the transcriptional control of the promoter). Coding sequences can be operably linked to regulatory sequences in a sense or antisense orientation. In another example, the complementary RNA regions of the disclosure can be operably linked, either directly or indirectly, 5′ to the target mRNA, or 3′ to the target mRNA, or within the target mRNA, or a first complementary region is 5′ and its complement is 3′ to the target mRNA.

[0122] As used herein, the phrases “recombinant construct”, “expression construct”, “chimeric construct”, “construct”, and “recombinant DNA construct” are used interchangeably herein. A recombinant construct comprises an artificial combination of nucleic acid fragments, e.g., regulatory and coding sequences that are not found together in nature. For example, a chimeric construct may comprise regulatory sequences and coding sequences that are derived from different sources, or regulatory sequences and coding sequences derived from the same source, but arranged in a manner different than that found in nature. Such construct may be used by itself or may be used in conjunction with a vector. If a vector is used then the choice of vector is dependent upon the method that will be used to transform host cells as is well known to those skilled in the art. For example, a plasmid vector can be used. The skilled artisan is well aware of the genetic elements that must be present on the vector in order to successfully transform, select and propagate host cells comprising any of the isolated nucleic acid fragments of the disclosure. The skilled artisan will also recognize that different independent transformation events will result in different levels and patterns of expression (Jones et al., (1985) EMBO J. 4:2411-2418; De Almeida et al., (1989) Mol. Gen. Genetics 218:78-86), and thus that multiple events must be screened in order to obtain lines displaying the desired expression level and pattern. Such screening may be accomplished by Southern analysis of DNA, Northern analysis of mRNA expression, immunoblotting analysis of protein expression, or phenotypic analysis, among others. Vectors can be plasmids, viruses, bacteriophages, pro-viruses, phagemids, transposons, artificial chromosomes, and the like, that replicate autonomously or can integrate into a chromosome of a host cell. A vector can also be a naked RNA polynucleotide, a naked DNA polynucleotide, a polynucleotide composed of both DNA and RNA within the same strand, a poly-lysine-conjugated DNA or RNA, a peptide-conjugated DNA or RNA, a liposome-conjugated DNA, or the like, that is not autonomously replicating. As used herein, the term “expression” refers to the production of a functional end-product e.g., an mRNA or a protein (precursor or mature).

[0123] In some embodiments, the cell or organism has at least one heterologous trait. As used herein, the term “heterologous trait” refers to a phenotype imparted to a transformed host cell or transgenic organism by an exogenous DNA segment, heterologous polynucleotide or heterologous nucleic acid. Various changes in phenotype are of interest to the present disclosure, including but not limited to modifying the fatty acid composition in milk, altering the carbohydrate content of milk, increasing an ungulate's yield of an economically important trait (e.g., milk, milk fat, milk proteins, etc.) and the like. These results can be achieved by providing expression of heterologous products or increased expression of endogenous products in organisms using the methods and compositions of the present disclosure.

[0124] As used herein, the term “MIC” means maximal information coefficient. MIC is a type of nonparamentric network analysis that identifies a score (MIC score) between active microbial strains of the present disclosure and at least one measured metadata (e.g., milk fat). Further, U.S. application Ser. No. 15/217,575, filed on Jul. 22, 2016 (issued as U.S. Pat. No. 9,540,676 on Jan. 10, 2017) is hereby incorporated by reference in its entirety.

[0125] The maximal information coefficient (MIC) is then calculated between strains and metadata 3021a, and between strains 3021b; as seen in FIG. 3. Results are pooled to create a list of all relationships and their corresponding MIC scores 3022. If the relationship scores below a given threshold 3023, the relationship is deemed/identified as irrelevant 3023b. If the relationship is above a given threshold 3023, the relationship deemed/identified as relevant 2023a, and is further subject to network analysis 3024. The following code fragment shows an exemplary methodology for such analysis, according to one embodiment:

```
Read total list of relationships file as links
threshold = 0.8
for i in range(len(links)):
  if links >= threshold
    multiplier[i] = 1
  else
    multiplier[i] = 0
  end if
  links_temp = multiplier*links
  final_links = links_temp[links_temp != 0]
  savetxt(output_file,final_links)
  output_file.close( )
```

[0126] Based on the output of the network analysis, active strains are selected 3025 for preparing products (e.g., ensembles, aggregates, and/or other synthetic groupings) containing the selected strains. The output of the network analysis can also be used to inform the selection of strains for further product composition testing.

[0127] The use of thresholds is discussed above for analyses and determinations. Thresholds can be, depending on the implementation and application: (1) empirically determined (e.g., based on distribution levels, setting a cutoff at a number that removes a specified or significant portion of low level reads); (2) any non-zero value; (3) percentage/percentile based; (4) only strains whose normalized second marker (i.e., activity) reads is greater than normalized first marker (cell count) reads; (5) log 2 fold change between activity and quantity or cell count; (6) normalized second marker (activity) reads is greater than mean second marker (activity) reads for entire sample (and/or sample set); and/or any magnitude threshold described above in addition to a statistical threshold (i.e., significance testing). The following example provides thresholding detail for distributions of RNA-based second marker measurements with respect to DNA-based first marker measurements, according to one embodiment.

[0128] As used herein “shelf-stable” refers to a functional attribute and new utility acquired by the microbes formulated according to the disclosure, which enable said microbes to exist in a useful/active state outside of their natural environment in the rumen (i.e. a markedly different characteristic). Thus, shelf-stable is a functional attribute created by the formulations/compositions of the disclosure and denoting that the microbe formulated into a shelf-stable composition can exist outside the rumen and under ambient conditions for a period of time that can be determined depending upon the particular formulation utilized, but in general means that the microbes can be formulated to exist in a composition that is stable under ambient conditions for at least a few days and generally at least one week. Accordingly, a “shelf-stable ruminant supplement” is a composition comprising one or more microbes of the disclosure, said microbes formulated in a composition, such that the composition is stable under ambient conditions for at least one week, meaning that the microbes comprised in the composition (e.g. whole cell, spore, or lysed cell) are able to impart one or more beneficial phenotypic properties to a ruminant when administered (e.g. increased milk yield, improved milk compositional characteristics, improved rumen health, and/or modulation of the rumen microbiome).

### Isolated Microbes

[0129] In some aspects, the present disclosure provides isolated microbes, including novel strains of microbes, presented in Table 1 and Table 3.

[0130] In other aspects, the present disclosure provides isolated whole microbial cultures of the microbes identified in Table 1 and Table 3. These cultures may comprise microbes at various concentrations.

[0131] In some aspects, the disclosure provides for utilizing one or more microbes selected from Table 1 and Table 3 to increase a phenotypic trait of interest in a ruminant.

[0132] In some embodiments, the disclosure provides isolated microbial species belonging to taxonomic families of Clostridiaceae, Ruminococcaceae, Lachnospiraceae, Acidaminococcaceae, Peptococcaceae, Porphyromonadaceae, Prevotellaceae, Neocallimastigaceae, Saccharomycetaceae, Phaeosphaeriaceae, Erysipelotrichia, Anaerolinaeceae, Atopobiaceae, Botryosphaeriaceae, Eubacteriaceae, Acholeplasmataceae, Succinivibrionaceae, Lactobacillaceae, Selenomonadaceae, Burkholderiaceae, and Streptococcaceae.

[0133] In further embodiments, isolated microbial species may be selected from genera of family Clostridiaceae, including Acetanaerobacterium, Acetivibrio, Acidaminobacter, Alkaliphilus, Anaerobacter, Anaerostipes, Anaerotruncus, Anoxynatronum, Bryantella, Butyricicoccus, Caldanaerocella, Caloramator, Caloranaerobacter, Caminicella, Candidatus Arthromitus, Clostridium, Coprobacillus, Dorea, Ethanologenbacterium, Faecalibacterium, Garciella, Guggenheimella, Hespellia, Linmingia, Natronincola, Oxobacter, Parasporobacterium, Sarcina, Soehngenia, Sporobacter, Subdoligranulum, Tepidibacter, Tepidimicrobium, Thermobrachium, Thermohalobacter, and Tindallia.

[0134] In further embodiments, isolated microbial species may be selected from genera of family Ruminococcaceae, including Ruminococcus, Acetivibrio, Sporobacter, Anaerofilium, Papillibacter, Oscillospira, Gemmiger, Faecalibacterium, Fastidiosipila, Anaerotruncus, Ethanolingenens, Acetanaerobacterium, Subdoligranulum, Hydrogenoanaerobacterium, and Candidadus Soleaferrea.

[0135] In further embodiments, isolated microbial species may be selected from genera of family Lachnospiraceae, including Butyrivibrio, Roseburia, Lachnospira, Acetitomaculum, Coprococcus, Johnsonella, Catonella, Pseudobutyrivibrio, Syntrophococcus, Sporobacterium, Parasporobacterium, Lachnobacterium, Shuttleworthia, Dorea, Anaerostipes, Hespellia, Marvinbryantia, Oribacterium, Moryella, Blautia, Robinsoniella, Cellulosilyticum, Lachnoanaerobaculum, Stomatobaculum, Fusicatenibacter, Acetatifactor, and Eisenbergiella.

[0136] In further embodiments, isolated microbial species may be selected from genera of family Acidaminococcaceae, including Acidaminococcus, Phascolarctobacterium, Succiniclasticum, and Succinispira.

[0137] In further embodiments, isolated microbial species may be selected from genera of family Peptococcaceae, including Desulfotomaculum, Peptococcus, Desulfitobacterium, Syntrophobotulus, Dehalobacter, Sporotomaculum, Desulfosporosinus, Desulfonispora, Pelotomaculum, Thermincola, Cryptanaerobacter, Desulfitibacter, Candidatus Desulforudis, Desulfurispora, and Desulfitospora.

[0138] In further embodiments, isolated microbial species may be selected from genera of family Porphyromonadaceae, including Porphyromonas, Dysgonomonas, Tannerella, Odoribacter, Proteiniphilum, Petrimonas, Paludibacter, Parabacteroides, Barnesiella, Candidatus Vestibaculum, Butyricimonas, Macellibacteroides, and Coprobacter.

[0139] In further embodiments, isolated microbial species may be selected from genera of family Anaerolinaeceae including Anaerolinea, Bellilinea, Leptolinea, Levilinea, Longilinea, Ornatilinea, and Pelolinea.

[0140] In further embodiments, isolated microbial species may be selected from genera of family Atopobiaceae including Atopbium and Olsenella.

[0141] In further embodiments, isolated microbial species may be selected from genera of family Eubacteriaceae including Acetobacterium, Alkalibacter, Alkalibaculum, Aminicella, Anaerofustis. Eubacterium, Garciella, and Pseudoramibacter.

[0142] In further embodiments, isolated microbial species may be selected from genera of family Acholeplasmataceae including Acholeplasma.

[0143] In further embodiments, isolated microbial species may be selected from genera of family Succinivibrionaceae including Anaerobiospirillun, Ruminobacter, Succinatimonas, Succininonas, and Succinivibrio.

[0144] In further embodiments, isolated microbial species may be selected from genera of family Lactobacillaceae including Lactobacillus, Paralactobacillus, Pediococcus, and Sharpea.

[0145] In further embodiments, isolated microbial species may be selected from genera of family Selenomonadaceae including Anaerovibrio, Centipeda, Megamonas, Mitsuokella, Pectinatus, Propionispira, Schwartzia, Selenomonas, and Zymophilus.

[0146] In further embodiments, isolated microbial species may be selected from genera of family Burkholderiaceae including Burkholderia, Chitinimonas, Cupriavidus, Lautropia, Limnobacter, Pandoraea, Paraburkholderia, Paucimonas, Polynucleobacter, Ralstonia, Thermothrix, and Wautersia.

[0147] In further embodiments, isolated microbial species may be selected from genera of family Streptococcaceae including Lactococcus, Lactovum, and Streptococcus.

[0148] In further embodiments, isolated microbial species may be selected from genera of family Anaerolinaeceae including Aestuariimicrobium, Arachnia, Auraticoccus, Brooklawnia, Friedmanniella, Granulicoccus, Luteococcus, Mariniluteicoccus, Microlunatus, Micropruina, Naumannella, Propionibacterium, Propionicicella, Propioniciclava, Propioniferax, Propionimicrobium, and Tessaracoccus.

[0149] In further embodiments, isolated microbial species may be selected from genera of family Prevotellaceae, including Paraprevotella, Prevotella, hallella, Xylanibacter, and Alloprevotella.

[0150] In further embodiments, isolated microbial species may be selected from genera of family Neocallimastigaceae, including Anaeromyces, Caecomyces, Cyllamyces, Neocallimastix, Orpinomyces, and Piromyces.

[0151] In further embodiments, isolated microbial species may be selected from genera of family Saccharomycetaceae, including Brettanomyces, Candida, Citeromyces, CyWiclomyces, Debaryonyces, Issatchenkia, Kazachstania (syn. Arxiozyma), Kluyveromyces, Komagataella, Kuraishia, Lachancea, Lodderomyces, Nakaseomyces, Pachysolen, Pichia, Saccharomyces, Spathaspora, Tetrapisispora, Vanderwaltoryma, Torulaspora, Williopsis, Zygosaccharomyces, and Zygotorulaspora.

[0152] In further embodiments, isolated microbial species may be selected from genera of family Erysipelotrichaceae, including Erysipelothrix, Solobacterium, Turicibacter, Faecalibaculum, Faecalicoccus, Faecalitalea, Holdemanella, Holdemania, Dielma, Eggerthia, Erysipelatoclostridium, Allobacterium, Breznakia, Bulleidia, Catenibacterium, Catenisphaera, and Coprobacillus.

[0153] In further embodiments, isolated microbial species may be selected from genera of family Phaeosphaeriaceae, including Barria, Bricookea, Carinispora, Chaetoplea, Eudarluca, Hadrospora, lsthmosporella, Katumotoa, Lautitia, Metameris, Mixtura, Neophaeosphaeria, Nodulosphaeria, Ophiosphaerella, Phaeosphaeris, Phaeosphaeriopsis, Setomelanomma, Stagonospora, Teratosphaeria, and Wilmia.

[0154] In further embodiments, isolated microbial species may be selected from genera of family Botryosphaeriaceae, including Amarenomyces, Aplosporella, Auerswaldiella, Botryosphaeria, Dichomera, Diplodia, Discochora, Dothidothia, Dothiorella, Fusicoccum, Granulodiplodia, Guignardia, Lasiodiplodia, Leptodothiorella, Leptodothiorella, Leptoguignardia, Macrophoma, Macrophomina, Nattrassia, Neodeightonia, Neofusicocum, Neoscytalidium, Otthia, Phaeobotryosphaeria, Phomatosphaeropsis, Phyllosticta, Pseudofusicoccum, Saccharata, Sivanesania, and Thyrostroma.

[0155] In some embodiments, the disclosure provides isolated microbial species belonging to genera of: Clostridium, Ruminococcus, Roseburia, Hydrogenoanaerobacterium, Saccharofermentans, Papillibacter, Pelotomaculum, Butyricicoccus, Tannerella, Prevotella, Butyricimonas, Piromyces, Candida, Vrystaatia, Orpinomyces, Neocallimastix, and Phyllosticta. In further embodiments, the disclosure provides isolated microbial species belonging to the family of Lachnospiraceae, and the order of Saccharomycetales. In further embodiments, the disclosure provides isolated microbial species of Candida xylopsoci, Vrystaatia aloeicola, and Phyllosticta capitalensis.

[0156] In some embodiments, a microbe from the taxa disclosed herein are utilized to impart one or more beneficial properties or improved traits to milk in ruminants.

[0157] In some embodiments, the disclosure provides isolated microbial species, selected from the group consisting of: Clostridium, Ruminococcus, Roseburia, Hydrogenoanaerobacterium, Saccharofermentans, Papillibacter, Pelotomaculum, Butyricicoccus, Tannerella, Prevotella, Butyricimonas, Piromyces, Pichia, Candida, Vrystaatia, Orpinomyces, Neocallimastix, and Phyllosticta.

[0158] In some embodiments, the disclosure provides novel isolated microbial strains of species, selected from the group consisting of: Clostridium, Ruminococcus, Roseburia, Hydrogenoanaerobacterium, Saccharofermentans, Papillibacter, Pelotomaculum, Butyricicoccus, Mannerella, Prevotella, Butvricimonas, Piromyces, Pichia, Candida, Vrystaatia, Orpinomyces, Neocallinastix, Ruminococcus, and Phyllosticta. Particular novel strains of these aforementioned taxonomic groups can be found in Table 1 and/or Table 3.

[0159] In some embodiments, the disclosure provides isolated microbial strains of Ruminococcus bovis. In some embodiments, the isolated microbial strain of Ruminococcus bovis comprises the 16S nucleic acid sequence of SEQ ID NO: 2108. In some embodiments, the isolated microbial strain of Ruminococcus bovis comprises the deposit accession number PTA-125917, NRRL B-67764, TSD-225, or NCTC 14479. In some embodiments, the isolated strain of Ruminococcus bovis comprises one or more mutations selected from the group consisting of: (a) a G→T substitution at position 297 of SEQ ID NO: 2109; (b) a CC→TA substitution at positions 301-302 of SEQ ID NO: 2111; (c) a T→G substitution at position 307 of SEQ ID NO: 2111; (d) a −A deletion at position 300 of SEQ ID NO: 2113; (e) a CCA→TTC substitution at positions 116-118 of SEQ ID NO: 2115; (f) a +T insertion between positions 105-106 of SEQ ID NO: 2117; (g) a C→T substitution at position 298 of SEQ ID NO: 2119; (h) a C→A substitution at position 298 of SEQ ID NO: 2121; and (i) a +AC insertion between positions 43-44 of SEQ ID NO: 2123. In some embodiments, the isolated strain of Ruminococcus bovis comprises a nucleic acid sequence selected from any one of SEQ ID NOs: 2110, 2112, 2114, 2116, 2118, 2120, 2122, or 2124.

[0160] In some embodiments, the present disclosure provides an orally deliverable composition for increasing milk production or improving milk compositional characteristics in a ruminant, comprising: (a) Ruminococcus bovis comprising one or more mutations selected from the group consisting of: (i) a G→T substitution at position 297 of SEQ ID NO: 2109; (ii) a CC→TA substitution at positions 301-302 of SEQ ID NO: 2111; (iii) a T→G substitution at position 307 of SEQ ID NO: 2111; (iv) a −A deletion at position 300 of SEQ ID NO: 2113; (v) a CCA→TTC substitution at positions 116-118 of SEQ ID NO: 2115; (vi) a +T insertion between positions 105-106 of SEQ ID NO: 2117; (vii) a C→T substitution at position 298 of SEQ ID NO: 2119; (viii) a C→A substitution at position 298 of SEQ ID NO: 2121; and (ix) a +AC insertion between positions 43-44 of SEQ ID NO: 2123; and (b) a carrier suitable for oral ruminant administration.

[0161] In some embodiments, the present disclosure provides an orally deliverable composition for increasing milk production or improving milk compositional characteristics in a ruminant, comprising: (a) Ruminococcus bovis comprising a nucleic acid sequence selected from any one of SEQ ID NOs: 2110, 2112, 2114, 2116, 2118, 2120, 2122, or 2124; and (b) a carrier suitable for oral ruminant administration.

[0162] Furthermore, the disclosure relates to microbes having characteristics substantially similar to that of a microbe identified in Table 1 or Table 3.

[0163] The isolated microbial species, and novel strains of said species, identified in the present disclosure, are able to impart beneficial properties or traits to ruminant milk production. For instance, the isolated microbes described in Table 1 and Table 3, or consortia of said microbes, are able to increase total milk fat in ruminant milk. The increase can be quantitatively measured, for example, by measuring the effect that said microbial application has upon the modulation of total milk fat.

[0164] In some embodiments, the isolated microbial strains are microbes of the present disclosure that have been genetically modified. In some embodiments, the genetically modified or recombinant microbes comprise polynucleotide sequences which do not naturally occur in said microbes. In some embodiments, the microbes may comprise heterologous polynucleotides. In further embodiments, the heterologous polynucleotides may be operably linked to one or more polynucleotides native to the microbes.

[0165] In some embodiments, the heterologous polynucleotides may be reporter genes or selectable markers. In some embodiments, reporter genes may be selected from any of the family of fluorescence proteins (e.g., GFP, RFP, YFP, and the like), β-galactosidase, luciferase. In some embodiments, selectable markers may be selected from neomycin phosphotransferase, hygromycin phosphotransferase, aminoglycoside adenyltransferase, dihydrofolate reductase, acetolactase synthase, bromoxynil nitrilase, β-glucuronidase, dihydrogolate reductase, and chloramphenicol acetyltransferase. In some embodiments, the heterologous polynucleotide may be operably linked to one or more promoter.

TABLE 5
Taxa (largely Genera) of the present disclosure not
known to have been utilized in animal agriculture.

| | |
|---|---|
| Intestinimonas | Anaerolinea |
| Pseudobutyrivibrio | Olsenella |
| Eubacterium | Catenisphaera |
| Faecalibacterium | Solobacterium |
| Blautia | Ralsonia |
| Coprococcus | Casaltella |
| Anaeroplasma | Acholeplasma |
| Aminiphilus | Mitsuokella |
| Alistipes | Sharpea |
| Oscillibacter | Neocallimastix |
| Odoribacter | Pichia |
| Tannerella | Candida |
| Hydrogenoanaerobacterium | Orpinomyces |
| Succinivibrio | Sugiyamaella |
| Ruminobacter | Cyllamyces |
| Lachnospira | Caecomyces |
| Sinimarinibacterium | Tremella |
| Hydrogenoanaerobacterium | Turicibacter |
| Clostridium XlVa | Anaerolinea |
| Saccharofermentans | Piromyces |
| Butyricicoccus | Olsenella |
| Papillibacter | Clostridium XICa |
| Pelotomaculum | Erysipelotrichaceae |
| Lachnospiracea | Solobacterium |
| Anaeroplasma | Ralstonia |
| Clostridium | Eubacterium |
| Rikenella | Lachnobacterium |
| Tannerella | Acholeplasma |
| Howardella | Selenomonas |
| Butyricimonas | Sharpea |
| Succinivibrio | Phyllosticta |
| Ruminobacter | Candida xylopsoc |
| Syntrophococcus | Candida apicol |
| Pseudobutyrivibrio | Saccharomycetales |
| Ascomycota | Candida rugos |

### Microbial Consortia

[0166] In some aspects, the disclosure provides microbial consortia comprising a combination of at least any two microbes selected from amongst the microbes identified in Table 1 and/or Table 3.

[0167] In certain embodiments, the consortia of the present disclosure comprise two microbes, or three microbes, or four microbes, or five microbes, or six microbes, or seven microbes, or eight microbes, or nine microbes, or ten or more microbes. Said microbes of the consortia are different microbial species, or different strains of a microbial species.

[0168] In some embodiments, the disclosure provides consortia, comprising: at least two isolated microbial species belonging to genera of: Clostridium, Ruminococcus, Roseburia, Hydrogenoanaerobacterium, Saccharofermentans, Papillibacter, Pelotomacuium, Butnricicoccus, Tannerella, Prevotella, Butyricimonas, Piromyces, Pichia, Candida, Vrystaatia, Orpinomyces, Neocallimastix, and Phyllosticta. Particular novel strains of species of these aforementioned genera can be found in Table 1 and/or Table 3.

[0169] In some embodiments, the disclosure provides consortia, comprising: at least two isolated microbial species, selected from the group consisting of species of the family of Lachnospiraceae, and the order of Saccharomycetales.

[0170] In particular aspects, the disclosure provides microbial consortia, comprising species as grouped in Tables 6-12. With respect to Tables 6-12, the letters A through I represent a non-limiting selection of microbes of the present disclosure, defined as:

[0171] A=Strain designation Ascusb_5 (SEQ ID NO: 1) identified in Table 1;

[0172] B=Strain designation Ascusb_3138 (SEQ ID NO: 28) identified in Table 1:

[0173] C=Strain designation Ascusb_5 (SEQ ID NO: 2108) identified in Table 1;

[0174] D=Strain designation Ascusb_826 (SEQ ID NO: 2067) identified in Table;

[0175] E=Strain designation Ascusf_22 (SEQ ID NO: 33) identified in Table 1;

[0176] F=Strain designation Ascusf_23 (SEQ ID NO: 34) identified in Table 1;

[0177] G=Strain designation Ascusf_24 (SEQ ID NO. 35) identified in Table 1;

[0178] H=Strain designation Ascusf_45 (SEQ ID NO: 38) identified in Table 1; and

[0179] I=Strain designation Ascusf_15 (SEQ ID NO: 32) identified in Table 1.

TABLE 6
Eight and Nine Strain Consortia

| | | | | | |
|---|---|---|---|---|---|
| A, B, C, D, E, F, G, H | A, B, C, D, E, F, G, I | A, B, C, D, E, F, H, I | A, B, C, D, E, G, H, I | A, B, C, D, F, G, H, I | A, B, C, E, F, G, H, I |
| A, B, D, E, F, G, H, I | A, C, D, E, F, G, H, I | B, C, D, E, F, G, H, I | A, B, C, D, E, F, G, H, I | | |

TABLE 7
Seven Strain Consortia

| | | | | | |
|---|---|---|---|---|---|
| A, B, C, D, E, F, G | A, B, C, D, E, F, H | A, B, C, D, E, F, I | A, B, C, D, E, G, H | A, B, C, D, E, G, I | A, B, C, D, E, H, I |
| A, B, C, D, F, G, H | A, B, C, D, F, G, I | A, B, C, D, F, H, I | A, B, C, D, G, H, I | A, B, C, E, F, G, H | A, B, C, E, F, G, I |
| A, B, C, E, F, H, I | A, B, C, E, G, H, I | A, B, C, F, G, H, I | A, B, D, E, F, G, H | A, B, D, E, F, G, I | A, B, D, E, F, H, I |
| A, B, D, E, G, H, I | A, B, D, F, G, H, I | A, B, E, F, G, H, I | A, C, D, E, F, G, H | A, C, D, E, F, G, I | A, C, D, E, F, H, I |
| A, C, D, E, G, H, I | A, C, D, F, G, H, I | A, C, E, F, G, H, I | A, D, E, F, G, H, I | B, C, D, E, F, G, H | B, C, D, E, F, G, I |
| B, C, D, E, F, H, I | B, C, D, E, G, H, I | B, C, D, F, G, H, I | B, C, E, F, G, H, I | B, D, E, F, G, H, I | C, D, E, F, G, H, I |

TABLE 8
Six Strain Consortia

| | | | | | | |
|---|---|---|---|---|---|---|
| A, B, C, D, E, F | A, B, C, D, E, G | A, B, C, D, E, H | A, B, C, D, E, I | A, B, C, D, F, G | A, B, C, D, F, H | A, B, C, D, F, I |
| A, B, C, D, G, H | A, B, C, D, G, I | A, B, C, D, H, I | A, B, C, E, F, G | A, B, C, E, F, H | A, B, C, E, F, I | A, B, C, E, G, H |
| A, B, C, E, G, I | A, B, C, E, H, I | A, B, C, F, G, H | A, B, C, F, G, I | A, B, C, F, H, I | A, B, C, G, H, I | A, B, D, E, F, G |
| A, B, D, E, F, H | A, B, D, E, F, I | A, B, D, E, G, H | A, B, D, E, G, I | A, B, D, E, H, I | A, B, D, F, G, H | A, B, D, F, G, I |
| D, E, F, G, H, I | C, E, F, G, H, I | A, B, D, F, H, I | A, B, D, G, H, I | A, B, E, F, G, H | A, B, E, F, G, I | A, B, E, F, H, I |
| A, B, E, G, H, I | A, B, F, G, H, I | A, C, D, E, F, G | A, C, D, E, F, H | A, C, D, E, F, I | A, C, D, E, G, H | A, C, D, E, G, I |
| A, C, D, E, H, I | A, C, D, F, G, H | A, C, D, F, G, I | A, C, D, F, H, I | A, C, D, G, H, I | A, C, E, F, G, H | A, C, E, F, G, I |
| A, C, E, F, H, I | A, C, E, G, H, I | A, C, F, G, H, I | A, D, E, F, G, H | A, D, E, F, G, I | A, D, E, F, H, I | A, D, E, G, H, I |
| A, D, F, G, H, I | A, E, F, G, H, I | B, C, D, E, F, G | B, C, D, E, F, H | B, C, D, E, F, I | B, C, D, E, G, H | B, C, D, E, G, I |
| B, C, D, E, H, I | B, C, D, F, G, H | B, C, D, F, G, I | B, C, D, F, H, I | B, C, D, G, H, I | B, C, E, F, G, H | B, C, E, F, G, I |
| B, C, E, F, H, I | B, C, E, G, H, I | B, C, F, G, H, I | B, D, E, F, G, H | B, D, E, F, G, I | B, D, E, F, H, I | B, D, E, G, H, I |
| B, D, F, G, H, I | B, E, F, G, H, I | C, D, E, F, G, H | C, D, E, F, G, I | C, D, E, F, H, I | C, D, E, G, H, I | C, D, F, G, H, I |

TABLE 9
Five Strain Consortia

| | | | | | | | |
|---|---|---|---|---|---|---|---|
| A, B, C, D, E | A, B, C, D, F | A, B, C, D, G | A, B, C, D, H | A, B, C, D, I | A, B, C, E, F | A, B, C, E, G | A, B, C, E, H |
| A, B, C, F, H | A, B, C, F, G | A, B, C, F, I | A, B, C, G, H | A, B, C, G, I | A, B, C, H, I | A, B, D, E, F | A, B, D, E, G |
| A, B, D, E, I | A, B, D, F, G | A, B, D, F, H | A, B, D, F, I | A, B, D, G, H | A, B, D, G, I | A, B, D, H, I | A, B, E, F, G |
| A, B, E, F, I | A, B, E, G, H | A, B, E, G, I | A, B, E, H, I | A, B, F, G, H | A, B, F, G, I | A, B, F, H, I | A, B, G, H, I |
| A, C, D, E, G | A, C, D, E, H | A, C, D, E, I | A, C, D, F, G | A, C, D, F, H | A, C, D, F, I | A, C, D, G, H | A, C, D, G, I |
| A, C, E, F, G | A, C, E, F, H | A, C, E, F, I | A, C, E, G, H | A, C, E, G, I | A, C, E, H, I | A, C, F, G, H | A, C, F, G, I |
| A, C, G, H, I | A, D, E, F, G | A, D, E, F, H | A, D, E, F, I | A, D, E, G, H | A, D, E, G, I | A, D, E, H, I | A, D, F, G, H |
| A, D, F, H, I | A, D, G, H, I | A, E, F, G, H | A, E, F, G, I | A, E, F, H, I | A, E, G, H, I | A, F, G, H, I | B, C, D, E, F |
| B, C, D, E, H | B, C, D, E, I | B, C, D, F, G | B, C, D, F, H | B, C, D, F, I | B, C, D, G, H | B, C, D, G, I | B, C, D, H, I |
| B, C, E, F, H | B, C, E, F, I | B, C, E, G, H | B, C, E, G, I | B, C, E, H, I | B, C, F, G, H | B, C, F, G, I | B, C, F, H, I |
| B, D, E, F, G | B, D, E, F, H | B, D, E, F, I | B, D, E, G, H | B, D, E, G, I | B, D, E, H, I | B, D, F, G, H | B, D, F, G, I |
| B, D, G, H, I | B, E, F, G, H | B, E, F, G, I | B, E, F, H, I | B, E, G, H, I | B, F, G, H, I | C, D, E, F, G | C, D, E, F, H |
| C, D, E, G, H | C, D, E, G, I | C, D, E, H, I | C, D, F, G, H | C, D, F, G, I | C, D, F, H, I | C, D, G, H, I | C, E, F, G, H |
| C, E, F, H, I | C, E, G, H, I | C, F, G, H, I | D, E, F, G, H | D, E, F, G, I | D, E, F, H, I | D, E, G, H, I | D, F, G, H, I |
| A, B, C, E, I | A, B, D, E, H | A, B, E, F, H | A, C, D, E, F | A, C, D, H, I | A, C, F, H, I | A, D, F, G, I | B, C, D, E, G |
| B, C, E, F, G | B, C, G, H, I | B, D, F, H, I | C, D, E, F, I | C, E, F, G, I | E, F, G, H, I | | |

TABLE 10
Four Strain Consortia

| | | | | | | | | |
|---|---|---|---|---|---|---|---|---|
| A, B, C, D | A, B, C, E | A, B, C, F | A, B, C, G | A, B, C, H | A, B, C, I | A, B, D, E | A, B, D, F | D, G, H, I |
| A, B, D, G | A, B, D, H | A, B, D, I | A, B, E, F | A, B, E, G | A, B, E, H | A, B, E, I | A, B, F, G | E, F, G, H |
| A, B, F, H | A, D, F, H | A, D, F, I | A, D, G, H | A, D, G, I | A, D, H, I | A, E, F, G | A, E, F, H | E, F, G, I |
| A, B, F, I | A, B, G, H | A, B, G, I | A, B, H, I | A, C, D, E | A, C, D, F | A, C, D, G | A, C, D, H | E, F, H, I |
| A, C, D, I | A, C, E, F | A, C, E, G | A, C, E, H | A, C, E, I | A, C, F, G | A, C, F, H | A, C, F, I | E, G, H, I |
| A, C, G, H | A, C, G, I | A, C, H, I | A, D, E, F | A, D, E, G | A, D, E, H | A, D, E, I | A, D, F, G | F, G, H, I |
| A, E, F, I | A, E, G, H | A, E, G, I | A, E, H, I | A, F, G, H | A, F, G, I | A, F, H, I | A, G, H, I | D, E, F, H |
| B, C, D, E | B, C, D, F | B, C, D, G | B, C, D, H | B, C, D, I | B, C, E, F | B, C, E, G | B, C, E, H | D, E, F, I |
| B, C, E, I | B, C, F, G | B, C, F, H | B, C, F, I | B, C, G, H | B, C, G, I | B, C, H, I | B, D, E, F | D, E, G, H |
| B, D, E, G | B, D, E, H | B, D, E, I | B, D, F, G | B, D, F, H | B, D, F, I | B, D, G, H | B, D, G, I | D, E, G, I |
| B, D, H, I | B, E, F, G | B, E, F, H | B, E, F, I | B, E, G, H | B, E, G, I | B, E, H, I | B, F, G, H | D, E, H, I |
| B, F, G, I | B, F, H, I | B, G, H, I | C, D, E, F | C, D, E, G | C, D, E, H | C, D, E, I | C, D, F, G | D, F, G, H |
| C, D, F, H | C, D, F, I | C, D, G, H | C, D, G, I | C, D, H, I | C, E, F, G | C, E, F, H | C, E, F, I | D, F, G, I |
| C, E, G, H | C, E, G, I | C, E, H, I | C, F, G, H | C, F, G, I | C, F, H, I | C, G, H, I | D, E, F, G | D, F, H, I |

TABLE 11
Three Strain Consortia

| | | | | | | | | | | |
|---|---|---|---|---|---|---|---|---|---|---|
| A, B, C | A, B, D | A, B, E | A, B, F | A, B, G | A, B, H | A, B, I | A, C, D | A, C, E | G, H, I | E, F, H |
| A, C, F | A, C, G | A, C, H | A, C, I | A, D, E | A, D, F | A, D, G | A, D, H | A, D, I | F, H, I | E, F, G |
| A, E, F | A, E, G | A, E, H | A, E, I | A, F, G | A, F, H | A, F, I | A, G, H | A, G, I | F, G, I | D, H, I |
| A, H, I | B, C, D | B, C, E | B, C, F | B, C, G | B, C, H | B, C, I | B, D, E | B, D, F | F, G, H | D, G, I |
| B, D, G | B, D, H | B, D, I | B, E, F | B, E, G | B, E, H | B, E, I | B, F, G | B, F, H | E, H, I | E, F, I |
| B, F, I | B, G, H | B, G, I | B, H, I | C, D, E | C, D, F | C, D, G | C, D, H | C, D, I | E, G, I | D, G, H |
| C, E, F | C, E, G | C, E, H | C, E, I | C, F, G | C, F, H | C, F, I | C, G, H | C, G, I | E, G, H | D, F, I |
| C, H, I | D, E, F | D, E, G | D, E, H | D, E, I | D, F, G | D, F, H | | | | |

TABLE 12
Two Strain Consortia

| | | | | | | | | | | | | | | | |
|---|---|---|---|---|---|---|---|---|---|---|---|---|---|---|---|
| A, B | A, C | A, D | A, E | A, F | A, G | A, H | A, I | B, C | B, D | B, E | B, F | B, G | B, H | B, I | C, D |
| C, E | C, F | C, G | C, H | C, I | D, E | D, F | D, G | D, H | D, I | E, F | E, G | E, H | E, I | F, G | F, H |
| F, I | G, H | G, I | H, I | | | | | | | | | | | | |

[0180] In some embodiments, the microbial consortia may be selected from any member group from Tables 6-12.

[0181] In some embodiments, the microbial consortia comprises: a Clostridium sp. comprising a 16S nucleic acid sequence sharing at least about 97% sequence identity to SEQ ID NO: 28; a Pichia sp. comprising an ITS nucleic acid sequence sharing at least about 97% sequence identity to SEQ ID NO: 32; a Ruminococcus sp. comprising a 16S nucleic acid sequence sharing at least about 97% sequence identity to SEQ ID NO: 2108; and/or a Butyrivibrio sp. comprising a 16S nucleic acid sequence sharing at least about 97% sequence identity to SEQ ID NO: 2067.

[0182] In some embodiments, the microbial consortia comprises: a Clostridium sp. comprising a 16S nucleic acid sequence of SEQ ID NO: 28; a Pichia sp. comprising an ITS nucleic acid sequence of SEQ ID NO: 32; a Ruminococcus sp. comprising a 16S nucleic acid sequence of SEQ ID NO: 2108; and/or a Butyrivibrio sp. comprising a 16S nucleic acid sequence of SEQ ID NO: 2067.

### Isolated Microbes—Source Material

[0183] The microbes of the present disclosure were obtained, among other places, at various locales in the United States from the gastrointestinal tract of cows.

### Isolated Microbes—Microbial Culture Techniques

[0184] The microbes of Table 1 and Table 3 were matched to their nearest taxonomic groups by utilizing classification tools of the Ribosomal Database Project (RDP) for 16s rRNA sequences and the User-friendly Nordic ITS Ectomycorrhiza (UNITE) database for ITS rRNA sequences. Examples of matching microbes to their nearest taxa may be found in Lan et al. (2012. PLOS one. 7(3):e32491), Schloss and Westcott (2011. Appl. Environ. Microbiol. 77(10):3219-3226), and Koljalg et al. (2005. New Phytologist. 166(3):1063-1068).

[0185] The isolation, identification, and culturing of the microbes of the present disclosure can be effected using standard microbiological techniques. Examples of such techniques may be found in Gerhardt, P. (ed.) Methods for General and Molecular Microbiology. American Society for Microbiology, Washington, D.C. (1994) and Lennette, E. H. (ed.) Manual of Clinical Microbiology, Third Edition. American Society for Microbiology, Washington, D.C. (1980), each of which is incorporated by reference.

[0186] Isolation can be effected by streaking the specimen on a solid medium (e.g., nutrient agar plates) to obtain a single colony, which is characterized by the phenotypic traits described hereinabove (e.g., Gram positive/negative, capable of forming spores aerobically/anaerobically, cellular morphology, carbon source metabolism, acid/base production, enzyme secretion, metabolic secretions, etc.) and to reduce the likelihood of working with a culture which has become contaminated.

[0187] For example, for microbes of the disclosure, biologically pure isolates can be obtained through repeated subculture of biological samples, each subculture followed by streaking onto solid media to obtain individual colonies or colony forming units. Methods of preparing, thawing, and growing lyophilized bacteria are commonly known, for example, Gherna, R L. and C. A. Reddy. 2007. Culture Preservation, p 1019-1033. In C. A. Reddy, T. J. Beveridge, J. A. Breznak, G. A. Marzluf, T. M. Schmidt, and L. R. Snyder, eds. American Society for Microbiology, Washington, D.C., 1033 pages; herein incorporated by reference. Thus freeze dried liquid formulations and cultures stored long term at −70° C. in solutions containing glycerol are contemplated for use in providing formulations of the present disclosure.

[0188] The microbes of the disclosure can be propagated in a liquid medium under aerobic conditions, or alternatively anaerobic conditions. Medium for growing the bacterial strains of the present disclosure includes a carbon source, a nitrogen source, and inorganic salts, as well as specially required substances such as vitamins, amino acids, nucleic acids and the like. Examples of suitable carbon sources which can be used for growing the microbes include, but are not limited to, starch, peptone, yeast extract, amino acids, sugars such as glucose, arabinose, mannose, glucosamine, maltose, and the like; salts of organic acids such as acetic acid, fumaric acid, adipic acid, propionic acid, citric acid, gluconic acid, malic acid, pyruvic acid, malonic acid and the like; alcohols such as ethanol and glycerol and the like; oil or fat such as soybean oil, rice bran oil, olive oil, corn oil, sesame oil. The amount of the carbon source added varies according to the kind of carbon source and is typically between 1 to 100 gram(s) per liter of medium. Preferably, glucose, starch, and/or peptone is contained in the medium as a major carbon source, at a concentration of 0.1-5% (W/V). Examples of suitable nitrogen sources which can be used for growing the bacterial strains of the present disclosure include, but are not limited to, amino acids, yeast extract, tryptone, beef extract, peptone, potassium nitrate, ammonium nitrate, ammonium chloride, ammonium sulfate, ammonium phosphate, ammonia or combinations thereof. The amount of nitrogen source varies according to the type of nitrogen source, typically between 0.1 to 30 gram per liter of medium. The inorganic salts, potassium dihydrogen phosphate, dipotassium hydrogen phosphate, disodium hydrogen phosphate, magnesium sulfate, magnesium chloride, ferric sulfate, ferrous sulfate, ferric chloride, ferrous chloride, manganous sulfate, manganous chloride, zinc sulfate, zinc chloride, cupric sulfate, calcium chloride, sodium chloride, calcium carbonate, sodium carbonate can be used alone or in combination. The amount of inorganic acid varies according to the kind of the inorganic salt, typically between 0.001 to 10 gram per liter of medium. Examples of specially required substances include, but are not limited to, vitamins, nucleic acids, yeast extract, peptone, meat extract, malt extract, dried yeast and combinations thereof. Cultivation can be effected at a temperature, which allows the growth of the microbial strains, essentially, between 20° C. and 46° C. In some aspects, a temperature range is 30° C.-39° C. For optimal growth, in some embodiments, the medium can be adjusted to pH 6.0-7.4. It will be appreciated that commercially available media may also be used to culture the microbial strains, such as Nutrient Broth or Nutrient Agar available from Difco, Detroit, Mich. It will be appreciated that cultivation time may differ depending on the type of culture medium used and the concentration of sugar as a major carbon source.

[0189] In some aspects, cultivation lasts between 24-96 hours. Microbial cells thus obtained are isolated using methods, which are well known in the art. Examples include, but are not limited to, membrane filtration and centrifugal separation. The pH may be adjusted using sodium hydroxide and the like and the culture may be dried using a freeze dryer, until the water content becomes equal to 4% or less. Microbial co-cultures may be obtained by propagating each strain as described hereinabove. In some aspects, microbial multi-strain cultures may be obtained by propagating two or more of the strains described hereinabove. It will be appreciated that the microbial strains may be cultured together when compatible culture conditions can be employed.

[0190] In some embodiments, the microorganisms of the present disclosure are subjected to a serial preservation challenge to improve microbial viability. In some embodiments, the microorganisms are subjected to a serial preservation challenge to improve stability. In some embodiments, the microorganisms of the present disclosure are subjected to at least one preservation challenge. In some embodiments, the microorganisms of the present disclosure are subjected to at least two, three, four, five, or more preservation challenges.

[0191] In some embodiments, the serial preservation method comprises: (a) subjecting a population of target microbial cells to a first preservation challenge to provide a first population of challenged microbial cells; (b) harvesting viable challenged microbial cells from the first population of challenged microbial cells to provide a first population of viable challenged microbial cells; (c) subjecting the first population of viable challenged microbial cells to a second preservation challenge to provide a second population of challenged microbial cells; (d) harvesting viable challenged microbial cells from the second population of challenged microbial cells to provide a second population of viable challenged microbial cells; (e) subjecting the second population of viable challenged microbial cells to a third preservation challenge to provide a third population of challenged microbial cells; (f) harvesting viable challenged microbial cells from the third population of challenged microbial cells to provide a third population of viable challenged microbial cells; (g) preserving the third population of viable challenged microbial cells to provide a population of preserved viability-enhanced microbial cells; and (h) preparing a product using the population of preserved viability-enhanced microbial cells.

[0192] In some embodiments, each of the preservation challenges are the same type of preservation challenge. For example, in some embodiments, the microorganisms of the present disclosure are subjected to two, three, four, five, or more preservation challenges before final preservation for storage and/or incorporation into a product, wherein each of the preservation challenges are of the same type. Types of preservation challenges include, but are not limited to, freeze drying/lyophilization, vitrification/glass formation, evaporation, foam formation, vaporization, cryopreservation, spray drying, adsorptive drying, extrusion, and fluid bed drying. Methods of microbial preservation are further described in PCT Application No. PCT/US2020/020311, herein incorporated by reference in its entirety.

[0193] In some embodiments, a population of target microbial cells is subjected to preservation by fluid bed drying. Fluid bed drying refers to a method in which particles are fluidized in a bed and dried. A fluidized bed is formed when a quantity of solid particulates are placed under conditions that cause a solid material to behave like a fluid. In a fluid bed drying system, inlet air provides significant air flow to support the weight of the particles.

[0194] In some embodiments, the preservation challenges are different types of preservation challenges. For example, in some embodiments, the microorganisms of the present disclosure are subjected to a first and a second preservation challenge, wherein the first and the second preservation challenges are different challenges types. For example, in some embodiments, the first preservation challenge is a cryopreservation challenge and the second preservation challenge is a freeze-drying preservation challenge.

[0195] In some embodiments, any one of the microorganisms listed in Table 1 or Table 3 may be subjected to serial preservation challenge. In some embodiments, a microorganism comprising a 16S nucleic acid sequence with at least 95% sequence identity to SEQ ID NOs: 1-30, 2045-2103, or 2108 is subjected to serial preservation challenge. In some embodiments, a microorganism comprising an ITS nucleic acid sequence with at least 95% sequence identity to SEQ ID NOs: 31-60 and 2104-2107 is subjected to serial preservation challenge. In some embodiments, the microorganism is a Clostridium sp. comprising a 16S nucleic acid sequence sharing at least 95% sequence identity to SEQ ID NO: 28. In some embodiments, the microorganism is a Pichia sp. comprising an ITS nucleic acid sequence sharing at least 95% sequence identity to SEQ ID NO: 32. In some embodiments, the microorganism is a Butyrivibrio sp. comprising a 16S nucleic acid sequence sharing at least 95% sequence identity to SEQ ID NO: 2067. In some embodiments, the microorganism is a Ruminococcus sp. comprising a 16S nucleic acid sequence sharing at least 95% sequence identity to SEQ ID NO: 1 or 2108. In some embodiments, the microorganism is Ruminococcus bovis comprising a 16S nucleic acid sequence of SEQ ID NO: 2108.

[0196] In some embodiments, serial preservation results in one or more mutations in the genome of a microorganism. In some embodiments, serial preservation results in one or more mutations in the genome of any one of the microorganisms listed in Table 1 or Table 3. In some embodiments, serial preservation results in one or more mutations in a microorganism comprising a 16S nucleic acid sequence with at least 95% sequence identity to SEQ ID NOs: 1-30, 2045-2103, or 2108. In some embodiments, serial preservation results in one or more mutations in a microorganism comprising an ITS nucleic acid sequence with at least 95% sequence identity to SEQ ID NOs: 31-60 and 2104-2107. In some embodiments, the microorganism is a Clostridium sp. comprising a 16S nucleic acid sequence sharing at least 95% sequence identity to SEQ ID NO: 28. In some embodiments, the microorganism is a Pichia sp. comprising an ITS nucleic acid sequence sharing at least 95% sequence identity to SEQ ID NO: 32. In some embodiments, the microorganism is a Butyrivibrio sp. comprising a 16S nucleic acid sequence sharing at least 95% sequence identity to SEQ ID NO: 2067. In some embodiments, the microorganism is a Ruminococcus sp. comprising a 16S nucleic acid sequence sharing at least 95% sequence identity to SEQ ID NO: 1 or 2108. In some embodiments, the one or more mutations is a nucleotide substitution, deletion, and/or insertion in the whole genome of the microorganism.

[0197] In some embodiments, serial preservation results in one or more mutations in Ruminococcus bovis comprising a 16S nucleic acid sequence of SEQ ID NO: 2108. In some embodiments, the one or more mutations are located in the whole genome of Ruminococcus bovis comprising a 16S nucleic acid sequence of SEQ ID NO: 2108. In some embodiments, the one or mutations are not located in the 16S nucleic acid sequence of SEQ ID NO: 2108 of Ruminococcus bovis. Illustrative mutations in the whole genome of Ruminococcus bovis (SEQ ID NO: 2108) following serial preservation challenge are shown in Table 13 below and further described in Example 3 and Table 18. The mutations in Table 13 are in bold and underlined.

TABLE 13
Illustrative mutations following serial preservation in Ruminococcus bovis

| | Ruminococcus bovis | Ruminococcus bovis |
|---|---|---|
| | (SEQ ID NO: 2108) | (SEQ TD NO: 2108) |
| | Before Serial Preservation | After Serial Preservation |
| Mutation 1 | GCACCAAATGCAAAGGTATATTTGAT | GCACCAAATGCAAAGGTATATTTGATT |
| Melibiose | TCTTGCAGGAATCTTGCCGTCAAGTC | CTTGCAGGAATCTTGCCGTCAAGTCTG |
| carrier protein, | TGCGTTCAGAACTGCGTTTCATAAAA | CGTTCAGAACTGCGTTTCATAAAAAAT |
| GalR-LacI | AATCCTCCTTAAATATAAAAAATGAA | CCTCCTTAAATATAAAAAATGAAACTA |
| family of | ACTAACCGTACAAAATGCATAAAAGA | ACCGTACAAAATGCATAAAAGAAATTA |
| transcriptional | AATTAATATTATTAATTATTAATATG | ATATTATTAATTATTAATATGCTTTTT |
| regulators | CTTTTTGCTTATCTGTTAACTAAATT | GCTTATCTGTTAACTAAATTATATGTT |
| | ATATGTTTTGTTTCATAAAAAGTCAA | TTGTTTCATAAAAAGTCAATATATTTA |
| | TATATTTAGTAAACAAAATTAAAGTT | GTAAACAAAATTAAAGTTTATCTATTT |
| | TATCTATTTTTCACTAAACAACCCTT | TTCACTAAACAACCCTTGCGTATTTAG |
| | GCGTATTTAGTAAATATTCACTATAA | TAAATATTCACTATAATAAGGGTAGAT |
| | TAAGGGTAGAG (SEQ ID NO: | (SEQ ID NO: 2110) |
| | 2109) | |
| Mutations 2-3 | TTTCACTCAATAACTGCATTGGACTT | TTTCACTCAATAACTGCATTGGACTTT |
| Hypothetical | TTGTATTCAAGTGTTCTCATTGTCTT | TGTATTCAAGTGTTCTCATTGTCTTGT |
| protein | GTTATTACTCCATTCTAAATGTCCTT | TATTACTCCATTCTAAATGTCCTTTTA |
| (integrase) | TTAACTTTGTATTTAATTCTTCAATA | ACTTTGTATTTAATTCTTCAATATTTT |
| | TTTTTGAATGTTTCCCAATCATAGAA | TGAATGTTTCCCAATCATAGAAATATC |
| | ATATCTTTGGTCGTTTCTATGACTTC | TTTGGTCGTTTCTATGACTTCTTTCTA |
| | TTTCTACCTTCCCATTGTGCCAAGGT | CCTTCCCATTGTGCCAAGGTGTTCGTG |
| | GTTCGTGGTGGTATTAATTTATGATT | GTGGTATTAATTTATGATTTATACCTA |
| | TATACCTAATTTGTTCAATTCTATTT | ATTTGTTCAATTCTATTTCAAAAGGAC |
| | CAAAAGGACTTTTCACTTCACTGCTT | TTTTCACTTCACTGCTTTGATATTTAT |
| | TGATATTTATATGTGAACTCTCTTCC | ATGTGAACTCTCTTCCGTTATCTGTTT |
| | GTTATCTGTTTGAACCGTCTT (SEQ | GAATAGTCTG (SEQ ID NO: 2112) |
| | ID NO: 2111) | |
| Mutation 4 | TATTCTCTAAAAGAAAATAAATTTGA | TATTCTCTAAAAGAAAATAAATTTGAA |
| Phospho- | ACAATCATACAAATTACAAAAATGAA | CAATCATACAAATTAGAAAAATGAAAT |
| mannomutase | ATTTTCTGTTCTGGAATAAAAAGACC | TTTCTGTTCTGGAATAAAAAGACCATA |
| | ATAAAAGCACCGAAAAAGCCCATGAG | AAAGCACCGAAAAAGCCCATCAGAATG |
| | AATGGGCTTTTCTTTATGTTATAACC | GGCTTTTCTTTATGTTATAACCGACTA |
| | GACTAAAAATAAGTAAAAATAAAATC | AAAATAAGTAAAAATAAAATCAAAAAA |
| | AAAAAATTTTAAAAAAAACTCTTTAG | TTTTAAAAAAAACTCTTTAGAATACTA |
| | AATACTAAAAATAGGTGAAATTATAT | AAAATAGGTGAAATTATATACTTAITT |
| | ACTTATTTTTATTGTATTGAACTTTG | TTATTGTATTGAACTTTGTTATATTGT |
| | TTATATTGTATAATAGTTTTAGAAAA | ATAATAGTTTTAGAAAATTAATTTAAG |
| | TTAATTTAAGGGGTATATTTTATGCT | GGGTATATTTTATGCTTGATAATTTTT |
| | TGATAATTTTTATAA (SEQ ID NO: | AT-A (SEQ ID NO: 2114) |
| | 2113) | |
| Mutation 5 | CGCCCCAAGAATGATAGTGTTTGCGT | CGCCCCAAGAATGATAGTGTTTGCGTT |
| Hypothetical | TTTTTACTAAAATTCCGTTTTAATTC | TTTTAGTAAAATTCCGTTTTAATTCTC |
| protein | TCTGCTGATTGTAGAAGGACTTCGTT | TGCTGATTGTAGAAGGACTTCGTTCAA |
| (transposase) | CAAGTATTTTTGCAATTTTTCTTATG | GTATTTTTGGAATTTTTCTTATGCTAT |
| | CTATATCCTTTCCA (SEQ ID NO: | ATCCTTTTTC (SEQ ID NO: 2116) |
| | 2115) | |
| Mutation 6 | TTACTAAATATTTTACATGTGCGCCC | TTACTAAATATTTTACATGTGCGCCCC |
| Hypothetical | CAAGAATGATAGTGTTTGCGTTTTTT | AAGAATGATAGTGTTTGCGTTTTTTAG |
| protein | ACTAAAATTCCGTTTTAATTCTCTGC | TAAAATTCCGTTTTAATTCTCTGCTGA |
| (transposase) | TGATTGTAGAAGGACTTCGTTCAAGT | TTGTAGAAGGACTTCGTTCAAGTATT |
| | A-T (SEQ ID NO: 2117) | (SEQ ID NO: 2118) |
| Mutation 7 | TAATCAGATTGAACGCGATATCAATT | TAATCAGATTGAACGCGATATCAATTC |
| Hypothetical | CCGAAAATGCCCCGAATGTTGTTAAG | CGAAAATGCCCCGAATGTTGTTAAGGA |
| protein | GATTACACAAGCAACGCGAAAATCAA | TTACACAAGCAACGCGAAAATCAAAAT |
| | AATCTCTCCGCTGGGTATCTCTCTTA | CTCTCCGCTGGGTATCTCTCTTACGGG |
| | CGGGCGAGTGTGATGAGAAATATGAC | CGAGTGTGATGAGAAATATGACAAGCA |
| | AAGCAAATGCCGGATTGGGGCAGTCG | AATGCCGGATTGGGGCAGTCGCTGCTT |
| | CTGCTTTGAGATTCCCGACACAGACG | TGAGATTCCCGACACAGACGGCAAATC |
| | GCAAATCAAAGGTAACAATGGATGAC | AAAGGTAACAATGGATGACGGAACAGT |
| | GGAACAGTTTATTATATCCTTGTAAA | TTATTATATCCTTGTAAACGAGGGCGG |
| | CGAGGGCGGCGAGCGCAGGACAGACG | CGAGCGCAGGACAGACGACAGCGGCGT |
| | ACAGCGGCGTTTTCCATGAGAATGCA | TTTCCATGAGAATGCACAGCTTCAATA |
| | CAGCTTCAATAC (SEQ ID NO: | T (SEQ ID NO: 2120) |
| | 2119) | |
| Mutation 8 | AAAAGGTACTGCACCATTTACTTTGT | AAAAGGTACTGCACCATTTACTTTGTT |
| Excinuclease | TAGATTATTTTCCAAAGGACTTTCTG | AGATTATTTTCCAAAGGACTTTCTGCT |
| ABC subunit B | CTTTTTGTTGATGAAAGCCATGTTAG | TTTTGTTGATGAAAGCCATGTTACTTT |
| | TTTACCTCAGGTTAGAGGTATGTATG | ACCTCAGGTTAGAGGTATGTATGGTGG |
| | GTGGTAACCTTTCAAGAAAGAAAAGT | TAACCTTTCAAGAAAGAAAAGTCTTAT |
| | CTTATTGATTATGGCTTTAGATTACC | TGATTATGGCTTTAGATTACCGTCAGC |
| | GTCAGCATATGACAACCGTCCTTTAA | ATATGACAACCGTCCTTTAAATTTTGA |
| | ATTTTGATGAATTTTATGATAGAATA | TGAATTTTATGATAGAATAAATCAAGT |
| | AATCAAGTCTGCTTTGTTTCAGCAAC | CTGCTTTGTTTCAGCAACACCGGGCGA |
| | ACCGGGCGACTTAGAACTTGAAAAGA | CTTAGAACTTGAAAAGAGCAGTGTTGT |
| | GCAGTGTTGTTGCAGAACAAATTATC | TGCAGAACAAATTATCCGTCCAACAGG |
| | CGTCCAACAGGC (SEQ ID NO: | A (SEQ ID NO: 2122) |
| | 2121) | |
| Mutation 9 | TGCCACAAAAAATATAAATATATAG-G | TGCCACAAAAAATATAAATATATAGGG |
| Hypothetical | GGCAAAATTACAACTAA- | GCAAAATTAGAACTAAACACACACCCA |
| protein | ACACACCCAAATAATCAAGACTTGCT | AATAATCAAGACTTGCTCTACTTGTAA |
| (stage II | CTACTTGTAAAATCAGTTGGAAATAA | AATCAGTTGGAAATAAAAAGTCAAAGG |
| sporulation | AAAGTCAAAGGACTTTTTAAATTCTA | ACTTTTTAAATTCTAAATCGGTATTTA |
| protein) | AATCGGTATTTACCCCAAAATATATA | CCCCAAAATATATACCCAGAATAAAAC |
| | CCCAGAATAAAACCTACTAAAATTGA | CTACTAAAATTGAAATAAGAAACATAG |
| | AATAAGAAACATAGTAAAGATACCGT | TAAAGATACCGTATC (SEQ ID NO: |
| | ATC (SEQ ID NO: 2123) | 2124) |

[0198] In some embodiments, serial preservation results in one or more mutations in Ruminococcus bovis comprising a 16S nucleic acid sequence of SEQ ID NO: 2108. In some embodiments, the one or more mutations is a G→T substitution at position 297 of SEQ ID NO: 2109. In some embodiments, the one or more mutations is a CC→TA substitution at positions 301-302 of SEQ ID NO: 2111. In some embodiments, the one or more mutations is a T→G substitution at position 307 of SEQ ID NO: 2111. In some embodiments, the one or more mutations is a −A deletion at position 300 of SEQ ID NO: 2113. In some embodiments, the one or more mutations is a CCA→TTC substitution at positions 116-118 of SEQ ID NO: 2115. In some embodiments, the one or more mutations is a +T insertion between positions 105-106 of SEQ ID NO: 2117. In some embodiments, the one or more mutations is a C→T substitution at position 298 of SEQ ID NO: 2119. In some embodiments, the one or more mutations is a C→A substitution at position 298 of SEQ ID NO: 2121. In some embodiments, the one or more mutations is a +AC insertion between positions 43-44 of SEQ ID NO; 2123.

[0199] In some embodiments, serial preservation results in one or more mutations in the genome of Ruminococcus bovis comprising a 16S nucleic acid sequence of SEQ ID NO: 2108. In some embodiments, the one or more mutations in Ruminococcus bovis comprising a 16S nucleic acid sequence of SEQ ID NO: 2108 results in a change in phenotype. In some embodiments, the one or more mutations in Ruminococcus bovis comprising a 16S nucleic acid sequence of SEQ ID NO: 2108 results in an increase in viability. In some embodiments, the one or more mutations in Ruminococcus bovis comprising a 16S nucleic acid sequence of SEQ ID NO: 2108 results in an increase in viability by about 5%, about 10%, about 15%, about 20%, about 25%, about 30%, about 35%, about 40%, about 50%, or more. In some embodiments, the one or more mutations in Ruminococcus bovis comprising a 16S nucleic acid sequence of SEQ ID NO: 2108 results in an increase in stability. In some embodiments, the one or more mutations in Ruminococcus bovis comprising a 16S nucleic acid sequence of SEQ ID NO: 2108 results in an increase in stability by about 5%, about 10%, about 15%, about 20%, about 25%, about 30%, about 35%, about 40%, about 50%, or more.

[0200] In some embodiments, serial preservation of the microorganisms of the present disclosure results in an increase in microbial viability of at least 5%. In other words, the viability of the population of microbes present at the conclusion of the serial preservation challenges is increased by at least 5% compared to the viability of the population of microbes that were present prior to any preservation challenges. In some embodiments, serial preservation of a microbial culture results in an increase in microbial viability between about 5% and about 300%, about 5% and about 25%, about 5% and about 20%, about 5% and about 15%, about 5% and about 10%, about 10% and about 300%, about 15% and about 30%, about 20% and about 30%, or about 25% and about 30%. In some embodiments, serial preservation of a microbial culture results in an increase in microbial viability between about 10% and about 30%, about 15% and about 30%, about 20% and about 30%, about 25% and about 30%, about 10% and about 25%, about 10% and about 20%, or about 10% and about 15%. In some embodiments, serial preservation of a microbial culture results in an increase in microbial viability of at least 6%, 7%, 8%, 9%, 10%, 11%, 12%, 13%, 14%, 15%, 16%, 17%, 18%, 19%, 20%, 21%, 22%, 23%, 24%, 25%, 26%, 27%, 28%, 29%, 30% or more.

[0201] In some embodiments, serial preservation of the microorganisms of the present disclosure results in an increase in microbial stability of at least 5%. In other words, the stability of the population of microbes present at the conclusion of the serial preservation challenges is increased by at least 5% compared to the stability of the population of microbes that were present prior to any preservation challenges. In some embodiments, serial preservation of a microbial culture results in an increase in stability between about 5% and about 30%, about 5% and about 25%, about 5% and about 20%, about 5% and about 15%, about 5% and about 10%, about 10% and about 30%, about 15% and about 30%, about 20% and about 30%, or about 25% and about 30%. In some embodiments, serial preservation of a microbial culture results in an increase in stability between about 10% and about 30%, about 15% and about 30%, about 20% and about 30%, about 25% and about 30%, about 10% and about 25%, about 10% and about 20%, or about 10% and about 15%. In some embodiments, serial preservation of a microbial culture results in an increase in stability of at least 6%, 7%, 8%, 9%, 10%, 11%, 12%, 13%, 14%, 15%, 16%, 17%, 18%, 19%, 20%, 21%, 22%, 23%, 24%, 25%, 26%, 27%, 28%, 29%, 30% or more.

### Isolated Microbes—Microbial Strains

[0202] Microbes can be distinguished into a genus based on polyphasic taxonomy, which incorporates all available phenotypic and genotypic data into a consensus classification (Vandamme et al. 1996. Polyphasic taxonomy, a consensus approach to bacterial systematics. Microbiol Rev 1996, 60:407-438). One accepted genotypic method for defining species is based on overall genomic relatedness, such that strains which share approximately 70% or more relatedness using DNA-DNA hybridization, with 5° C. or less ΔTₘ (the difference in the melting temperature between homologous and heterologous hybrids), under standard conditions, are considered to be members of the same species. Thus, populations that share greater than the aforementioned 70% threshold can be considered to be variants of the same species. Another accepted genotypic method for defining species is to isolate marker genes of the present disclosure, sequence these genes, and align these sequenced genes from multiple isolates or variants. The microbes are interpreted as belonging to the same species if one or more of the sequenced genes share at least 97% sequence identity.

[0203] The 16S or 18S rRNA sequences or ITS sequences are often used for making distinctions between species and strains, in that if one of the aforementioned sequences share less than a specified percent sequence identity from a reference sequence, then the two organisms from which the sequences were obtained are said to be of different species or strains.

[0204] Thus, one could consider microbes to be of the same species, if they share at least 80%, 85%, 90%, 95%, 97%, 98%, or 99% sequence identity across the 16S or 18S rRNA sequence, or the ITS1 or ITS2 sequence.

[0205] Further, one could define microbial strains of a species, as those that share at least 80%, 85%, 90%, 95%, 97%, 98%, or 99% sequence identity across the 16S or 18S rRNA sequence, or the ITS1 or ITS2 sequence.

[0206] In one embodiment, microbial strains of the present disclosure include those that comprise polynucleotide sequences that share at least 70%, 75%, 80%, 81%, 82%, 83%, 84%, 85%, 86%, 87%, 88%, 89%, 90%, 91%, 92%, 93%, 94%, 95%, 96%, 97%, 98%, 99% or 100% sequence identity with any one of SEQ ID NOs:1, 2, 3, 4, 5, 6, 7, 8, 9, 10, 11, 12, 13, 14, 15, 16, 17, 18, 19, 20, 21, 22, 23, 24, 25, 26, 27, 28, 39, 30, 31, 32, 33, 34, 35, 36, 37, 38, 39, 40, 41, 42, 43, 44, 45, 46, 47, 48, 49, 50, 51, 52, 53, 54, 55, 56, 57, 58, 59, 60, 2045, 2046, 2047, 2048, 2049, 2050, 2051, 2052, 2053, 2054, 2055, 2056, 2057, 2058, 2059, 2060, 2061, 2062, 2063, 2064, 2065, 2066, 2067, 2068, 2069, 2070, 2071, 2072, 2073, 2074, 2075, 2076, 2077, 2078, 2079, 2080, 2081, 2082, 2083, 2084, 2085, 2086, 2087, 2088, 2089, 2090, 2091, 2092, 2093, 2094, 2095, 2096, 2097, 2098, 2099, 2100, 2101, 2102, 2103, 2104, 2105, 2106, 2107, and 2108. In a further embodiment, microbial strains of the present disclosure include those that comprise polynucleotide sequences that share at least 70%, 75%, 80%, 81%, 82%, 83%, 84%, 85%, 86%, 87%, 88%, 89%, 90%, 91%, 92%, 93%, 94%, 95%, 96%, 97%, 98%, 99% or 100% sequence identity with any one of SEQ ID NOs:1-2108.

[0207] In one embodiment, microbial strains of the present disclosure include those that comprise polynucleotide sequences that share at least 97%, 97.1%, 97.2%, 97.3%, 97.4%, 97.5%, 97.6%, 97.7%, 97.8%, 97.9%, 98%, 98.1%, 98.2%, 98.3%, 98.4%, 98.5%, 98.6%, 98.7%, 98.8%, 98.9%, 99%, 99.1%, 99.2%, 99.3%, 99.4%, 99.5%, 99.60%, 99.7%, 99.8%, 99.9%, or 100% sequence identity with any one of SEQ ID NOs:1, 2, 3, 4, 5, 6, 7, 8, 9, 10, 11, 12, 13, 14, 15, 16, 17, 18, 19, 20, 21, 22, 23, 24, 25, 26, 27, 28, 39, 30, 31, 32, 33, 34, 35, 36, 37, 38, 39, 40, 41, 42, 43, 44, 45, 46, 47, 48, 49, 50, 51, 52, 53, 54, 55, 56, 57, 58, 59, 60, 2045, 2046, 2047, 2048, 2049, 2050, 2051, 2052, 2053, 2054, 2055, 2056, 2057, 2058, 2059, 2060, 2061, 2062, 2063, 2064, 2065, 2066, 2067, 2068, 2069, 2070, 2071, 2072, 2073, 2074, 2075, 2076, 2077, 2078, 2079, 2080, 2081, 2082, 2083, 2084, 2085, 2086, 2087, 2088, 2089, 2090, 2091, 2092, 2093, 2094, 2095, 2096, 2097, 2098, 2099, 2100, 2101, 2102, 2103, 2104, 2105, 2106, 2107, and 2108.

[0208] Comparisons may also be made with 23S rRNA sequences against reference sequences.

[0209] Unculturable microbes often cannot be assigned to a definite species in the absence of a phenotype determination, the microbes can be given a candidatus designation within a genus provided their 16S or 18S rRNA sequences or ITS sequences subscribes to the principles of identity with known species.

[0210] One approach is to observe the distribution of a large number of strains of closely related species in sequence space and to identify clusters of strains that are well resolved from other clusters. This approach has been developed by using the concatenated sequences of multiple core (house-keeping) genes to assess clustering patterns, and has been called multilocus sequence analysis (MLSA) or multilocus sequence phylogenetic analysis. MLSA has been used successfully to explore clustering patterns among large numbers of strains assigned to very closely related species by current taxonomic methods, to look at the relationships between small numbers of strains within a genus, or within a broader taxonomic grouping, and to address specific taxonomic questions. More generally, the method can be used to ask whether bacterial species exist—that is, to observe whether large populations of similar strains invariably fall into well-resolved clusters, or whether in some cases there is a genetic continuum in which clear separation into clusters is not observed.

[0211] In order to more accurately make a determination of genera, a determination of phenotypic traits, such as morphological, biochemical, and physiological characteristics are made for comparison with a reference genus archetype. The colony morphology can include color, shape, pigmentation, production of slime, etc. Features of the cell are described as to shape, size, Gram reaction, extracellular material, presence of endospores, flagella presence and location, motility, and inclusion bodies. Biochemical and physiological features describe growth of the organism at different ranges of temperature, pH, salinity and atmospheric conditions, growth in presence of different sole carbon and nitrogen sources. One of ordinary skill in the art would be reasonably apprised as to the phenotypic traits that define the genera of the present disclosure.

[0212] In one embodiment, the microbes taught herein were identified utilizing 16S rRNA gene sequences and ITS sequences. It is known in the art that 16S rRNA contains hypervariable regions that can provide species/strain-specific signature sequences useful for bacterial identification, and that ITS sequences can also provide species/strain-specific signature sequences useful for fungal identification.

[0213] Phylogenetic analysis using the rRNA genes and/or ITS sequences are used to define “substantially similar” species belonging to common genera and also to define “substantially similar” strains of a given taxonomic species. Furthermore, physiological and/or biochemical properties of the isolates can be utilized to highlight both minor and significant differences between strains that could lead to advantageous behavior in ruminants.

[0214] Compositions of the present disclosure may include combinations of fungal spores and bacterial spores, fungal spores and bacterial vegetative cells, fungal vegetative cells and bacterial spores, fungal vegetative cells and bacterial vegetative cells. In some embodiments, compositions of the present disclosure comprise bacteria only in the form of spores. In some embodiments, compositions of the present disclosure comprise bacteria only in the form of vegetative cells. In some embodiments, compositions of the present disclosure comprise bacteria in the absence of fungi. In some embodiments, compositions of the present disclosure comprise fungi in the absence of bacteria.

[0215] Bacterial spores may include endospores and akinetes. Fungal spores may include statismospores, ballistospores, autospores, aplanospores, zoospores, mitospores, megaspores, microspores, meiospores, chlamydospores, urediniospores, teliospores, oospores, carpospores, tetraspores, sporangiospores, zygospores, ascospores, basidiospores, ascospores, and asciospores.

[0216] In some embodiments, spores of the composition germinate upon administration to animals of the present disclosure. In some embodiments, spores of the composition germinate only upon administration to animals of the present disclosure.

### Microbial Compositions

[0217] In some embodiments, the microbes of the disclosure are combined into microbial compositions.

[0218] In some embodiments, the microbial compositions include ruminant feed, such as cereals (barley, maize, oats, and the like); starches (tapioca and the like); oilseed cakes; and vegetable wastes. In some embodiments, the microbial compositions include vitamins, minerals, trace elements, emulsifiers, aromatizing products, binders, colorants, odorants, thickening agents, and the like.

[0219] In some embodiments, the microbial compositions of the present disclosure are solid. Where solid compositions are used, it may be desired to include one or more carrier materials including, but not limited to: mineral earths such as silicas, talc, kaolin, limestone, chalk, clay, dolomite, diatomaceous earth; calcium sulfate; magnesium sulfate; magnesium oxide; products of vegetable origin such as cereal meals, tree bark meal, wood meal, and nutshell meal.

[0220] In some embodiments, the microbial compositions of the present disclosure are liquid. In further embodiments, the liquid comprises a solvent that may include water or an alcohol, and other animal-safe solvents. In some embodiments, the microbial compositions of the present disclosure include binders such as animal-safe polymers, carboxymethylcellulose, starch, polyvinyl alcohol, and the like.

[0221] In some embodiments, the microbial compositions of the present disclosure comprise thickening agents such as silica, clay, natural extracts of seeds or seaweed, synthetic derivatives of cellulose, guar gum, locust bean gum, alginates, and methylcelluloses. In some embodiments, the microbial compositions comprise anti-settling agents such as modified starches, polyvinyl alcohol, xanthan gum, and the like.

[0222] In some embodiments, the microbial compositions of the present disclosure comprise colorants including organic chromophores classified as nitroso; nitro; azo, including monoazo, bisazo and polyazo; acridine, anthraquinone, azine, diphenylmethane, indamine, indophenol, methine, oxazine, phthalocyanine, thiazine, thiazole, triarylmethane, xanthene. In some embodiments, the microbial compositions of the present disclosure comprise trace nutrients such as salts of iron, manganese, boron, copper, cobalt, molybdenum and zinc.

[0223] In some embodiments, the microbial compositions of the present disclosure comprise an animal-safe virucide or nematicide.

[0224] In some embodiments, microbial compositions of the present disclosure comprise saccharides (e.g., monosaccharides, disaccharides, trisaccharides, polysaccharides, oligosaccharides, and the like), polymeric saccharides, lipids, polymeric lipids, lipopolysaccharides, proteins, polymeric proteins, lipoproteins, nucleic acids, nucleic acid polymers, silica, inorganic salts and combinations thereof. In a further embodiment, microbial compositions comprise polymers of agar, agarose, gelrite, gellan gumand the like. In some embodiments, microbial compositions comprise plastic capsules, emulsions (e.g., water and oil), membranes, and artificial membranes. In some embodiments, emulsions or linked polymer solutions may comprise microbial compositions of the present disclosure. See Harel and Bennett (U.S. Pat. No. 8,460,726B2).

[0225] In some embodiments, microbial compositions of the present disclosure occur in a solid form (e.g., dispersed lyophilized spores) or a liquid form (microbes interspersed in a storage medium).

[0226] In some embodiments, microbial compositions of the present disclosure comprise one or more preservatives. The preservatives may be in liquid or gas formulations. The preservatives may be selected from one or more of monosaccharide, disaccharide, trisaccharide, polysaccharide, acetic acid, ascorbic acid, calcium ascorbate, erythorbic acid, iso-ascorbic acid, erythrobic acid, potassium nitrate, sodium ascorbate, sodium erythorbate, sodium iso-ascorbate, sodium nitrate, sodium nitrite, nitrogen, benzoic acid, calcium sorbate, ethyl lauroyl arginate, methyl-p-hydroxy benzoate, methyl paraben, potassium acetate, potassium benzoate, potassium bisulphite, potassium diacetate, potassium lactate, potassium metabisulphite, potassium sorbate, propyl-p-hydroxy benzoate, propyl paraben, sodium acetate, sodium benzoate, sodium bisulphite, sodium nitrite, sodium diacetate, sodium lactate, sodium metabisulphite, sodium salt of methyl-p-hydroxy benzoic acid, sodium salt of propyl-p-hydroxy benzoic acid, sodium sulphate, sodium sulfite, sodium dithionite, sulphurous acid, calcium propionate, dimethyl dicarbonate, natamycin, potassium sorbate, potassium bisulfite, potassium metabisulfite, propionic acid, sodium diacetate, sodium propionate, sodium sorbate, sorbic acid, ascorbic acid, ascorbyl palmitate, ascorbyl stearate, butylated hydro-xyanisole, butylated hydroxytoluene (BHT), butylated hydroxyl anisole (BHA), citric acid, citric acid esters of mono- and/or diglycerides, L-cysteine, L-cysteine hydrochloride, gum guaiacum, gum guaiac, lecithin, lecithin citrate, monoglyceride citrate, monoisopropyl citrate, propyl gallate, sodium metabisulphite, tartaric acid, tertiary butyl hydroquinone, stannous chloride, thiodipropionic acid, dilauryl thiodipropionate, distearyl thiodipropionate, ethoxyquin, sulfur dioxide, formic acid, or tocopherol(s).

[0227] In some embodiments, microbial compositions of the present disclosure include bacterial and/or fungal cells in spore form, vegetative cell form, and/or lysed cell form. In one embodiment, the lysed cell form acts as a mycotoxin binder, e.g. mycotoxins binding to dead cells.

[0228] In some embodiments, the microbial compositions are shelf stable in a refrigerator (35-40° F.) for a period of at least 1, 2, 3, 4, 5, 6, 7, 8, 9, 10, 11, 12, 13, 14, 15, 16, 17, 18, 19, 20, 21, 22, 23, 24, 25, 26, 27, 28, 29, 30, 31, 32, 33, 34, 35, 36, 37, 38, 39, 40, 41, 42, 43, 44, 45, 46, 47, 48, 49, 50, 51, 52, 53, 54, 55, 56, 57, 58, 59, or 60 days. In some embodiments, the microbial compositions are shelf stable in a refrigerator (35-40° F.) for a period of at least 1, 2, 3, 4, 5, 6, 7, 8, 9, 10, 11, 12, 13, 14, 15, 16, 17, 18, 19, 20, 21, 22, 23, 24, 25, 26, 27, 28, 29, 30, 31, 32, 33, 34, 35, 36, 37, 38, 39, 40, 41, 42, 43, 44, 45, 46, 47, 48, 49, 50, 51, 52, 53, 54, 55, 56, 57, 58, 59, or 60 weeks.

[0229] In some embodiments, the microbial compositions are shelf stable at room temperature (68-72° F.) or between 50-77° F. for a period of at least 1, 2, 3, 4, 5, 6, 7, 8, 9, 10, 11, 12, 13, 14, 15, 16, 17, 18, 19, 20, 21, 22, 23, 24, 25, 26, 27, 28, 29, 30, 31, 32, 33, 34, 35, 36, 37, 38, 39, 40, 41, 42, 43, 44, 45, 46, 47, 48, 49, 50, 51, 52, 53, 54, 55, 56, 57, 58, 59, or 60 days. In some embodiments, the microbial compositions are shelf stable at room temperature (68-72° F.) or between 50-77° F. for a period of at least 1, 2, 3, 4, 5, 6, 7, 8, 9, 10, 11, 12, 13, 14, 15, 16, 17, 18, 19, 20, 21, 22, 23, 24, 25, 26, 27, 28, 29, 30, 31, 32, 33, 34, 35, 36, 37, 38, 39, 40, 41, 42, 43, 44, 45, 46, 47, 48, 49, 50, 51, 52, 53, 54, 55, 56, 57, 58, 59, or 60 weeks.

[0230] In some embodiments, the microbial compositions are shelf stable at −23-35° F. for a period of at least 1, 2, 3, 4, 5, 6, 7, 8, 9, 10, 11, 12, 13, 14, 15, 16, 17, 18, 19, 20, 21, 22, 23, 24, 25, 26, 27, 28, 29, 30, 31, 32, 33, 34, 35, 36, 37, 38, 39, 40, 41, 42, 43, 44, 45, 46, 47, 48, 49, 50, 51, 52, 53, 54, 55, 56, 57, 58, 59, or 60 days. In some embodiments, the microbial compositions are shelf stable at −23-35° F. for a period of at least 1, 2, 3, 4, 5, 6, 7, 8, 9, 10, 11, 12, 13, 14, 15, 16, 17, 18, 19, 20, 21, 22, 23, 24, 25, 26, 27, 28, 29, 30, 31, 32, 33, 34, 35, 36, 37, 38, 39, 40, 41, 42, 43, 44, 45, 46, 47, 48, 49, 50, 51, 52, 53, 54, 55, 56, 57, 58, 59, or 60 weeks.

[0231] In some embodiments, the microbial compositions are shelf stable at 77-100° F. for a period of at least 1, 2, 3, 4, 5, 6, 7, 8, 9, 10, 11, 12, 13, 14, 15, 16, 17, 18, 19, 20, 21, 22, 23, 24, 25, 26, 27, 28, 29, 30, 31, 32, 33, 34, 35, 36, 37, 38, 39, 40, 41, 42, 43, 44, 45, 46, 47, 48, 49, 50, 51, 52, 53, 54, 55, 56, 57, 58, 59, or 60 days. In some embodiments, the microbial compositions are shelf stable at 77-100° F. for a period of at least 1, 2, 3, 4, 5, 6, 7, 8, 9, 10, 11, 12, 13, 14, 15, 16, 17, 18, 19, 20, 21, 22, 23, 24, 25, 26, 27, 28, 29, 30, 31, 32, 33, 34, 35, 36, 37, 38, 39, 40, 41, 42, 43, 44, 45, 46, 47, 48, 49, 50, 51, 52, 53, 54, 55, 56, 57, 58, 59, or 60 weeks.

[0232] In some embodiments, the microbial compositions are shelf stable at 101-213° F. for a period of at least 1, 2, 3, 4, 5, 6, 7, 8, 9, 10, 11, 12, 13, 14, 15, 16, 17, 18, 19, 20, 21, 22, 23, 24, 25, 26, 27, 28, 29, 30, 31, 32, 33, 34, 35, 36, 37, 38, 39, 40, 41, 42, 43, 44, 45, 46, 47, 48, 49, 50, 51, 52, 53, 54, 55, 56, 57, 58, 59, or 60 days. In some embodiments, the microbial compositions are shelf stable at 101-213° F. for a period of at least 1, 2, 3, 4, 5, 6, 7, 8, 9, 10, 11, 12, 13, 14, 15, 16, 17, 18, 19, 20, 21, 22, 23, 24, 25, 26, 27, 28, 29, 30, 31, 32, 33, 34, 35, 36, 37, 38, 39, 40, 41, 42, 43, 44, 45, 46, 47, 48, 49, 50, 51, 52, 53, 54, 55, 56, 57, 58, 59, or 60 weeks.

[0233] In some embodiments, the microbial compositions of the present disclosure are shelf stable at refrigeration temperatures (35-40° F.), at room temperature (68-72° F.), between 50-77° F., between −23-35° F., between 70-100° F., or between 101-213° F. for a period of about 1 to 100, about 1 to 95, about 1 to 90, about 1 to 85, about 1 to 80, about 1 to 75, about 1 to 70, about 1 to 65, about 1 to 60, about 1 to 55, about 1 to 50, about 1 to 45, about 1 to 40, about 1 to 35, about 1 to 30, about 1 to 25, about 1 to 20, about 1 to 15, about 1 to 10, about 1 to 5, about 5 to 100, about 5 to 95, about 5 to 90, about 5 to 85, about 5 to 80, about 5 to 75, about 5 to 70, about 5 to 65, about 5 to 60, about 5 to 55, about 5 to 50, about 5 to 45, about 5 to 40, about 5 to 35, about 5 to 30, about 5 to 25, about 5 to 20, about 5 to 15, about 5 to 10, about 10 to 100, about 10 to 95, about 10 to 90, about 10 to 85, about 10 to 80, about 10 to 75, about 10 to 70, about 10 to 65, about 10 to 60, about 10 to 55, about 10 to 50, about 10 to 45, about 10 to 40, about 10 to 35, about 10 to 30, about 10 to 25, about 10 to 20, about 10 to 15, about 15 to 100, about 15 to 95, about 15 to 90, about 15 to 85, about 15 to 80, about 15 to 75, about 15 to 70, about 15 to 65, about 15 to 60, about 15 to 55, about 15 to 50, about 15 to 45, about 15 to 40, about 15 to 35, about 15 to 30, about 15 to 25, about 15 to 20, about 20 to 100, about 20 to 95, about 20 to 90, about 20 to 85, about 20 to 80, about 20 to 75, about 20 to 70, about 20 to 65, about 20 to 60, about 20 to 55, about 20 to 50, about 20 to 45, about 20 to 40, about 20 to 35, about 20 to 30, about 20 to 25, about 25 to 100, about 25 to 95, about 25 to 90, about 25 to 85, about 25 to 80, about 25 to 75, about 25 to 70, about 25 to 65, about 25 to 60, about 25 to 55, about 25 to 50, about 25 to 45, about 25 to 40, about 25 to 35, about 25 to 30, about 30 to 100, about 30 to 95, about 30 to 90, about 30 to 85, about 30 to 80, about 30 to 75, about 30 to 70, about 30 to 65, about 30 to 60, about 30 to 55, about 30 to 50, about 30 to 45, about 30 to 40, about 30 to 35, about 35 to 100, about 35 to 95, about 35 to 90, about 35 to 85, about 35 to 80, about 35 to 75, about 35 to 70, about 35 to 65, about 35 to 60, about 35 to 55, about 35 to 50, about 35 to 45, about 35 to 40, about 40 to 100, about 40 to 95, about 40 to 90, about 40 to 85, about 40 to 80, about 40 to 75, about 40 to 70, about 40 to 65, about 40 to 60, about 40 to 55, about 40 to 50, about 40 to 45, about 45 to 100, about 45 to 95, about 45 to 90, about 45 to 85, about 45 to 80, about 45 to 75, about 45 to 70, about 45 to 65, about 45 to 60, about 45 to 55, about 45 to 50, about 50 to 100, about 50 to 95, about 50 to 90, about 50 to 85, about 50 to 80, about 50 to 75, about 50 to 70, about 50 to 65, about 50 to 60, about 50 to 55, about 55 to 100, about 55 to 95, about 55 to 90, about 55 to 85, about 55 to 80, about 55 to 75, about 55 to 70, about 55 to 65, about 55 to 60, about 60 to 100, about 60 to 95, about 60 to 90, about 60 to 85, about 60 to 80, about 60 to 75, about 60 to 70, about 60 to 65, about 65 to 100, about 65 to 95, about 65 to 90, about 65 to 85, about 65 to 80, about 65 to 75, about 65 to 70, about 70 to 100, about 70 to 95, about 70 to 90, about 70 to 85, about 70 to 80, about 70 to 75, about 75 to 100, about 75 to 95, about 75 to 90, about 75 to 85, about 75 to 80, about 80 to 100, about 80 to 95, about 80 to 90, about 80 to 85, about 85 to 100, about 85 to 95, about 85 to 90, about 90 to 100, about 90 to 95, or 95 to 100 weeks

[0234] In some embodiments, the microbial compositions of the present disclosure are shelf stable at refrigeration temperatures (35-40° F.), at room temperature (68-72° F.), between 50-77° F., between −23-35° F., between 70-100° F., or between 101-213° F. for a period of 1 to 100, 1 to 95, 1 to 90, 1 to 85, 1 to 80, 1 to 75, 1 to 70, 1 to 65, 1 to 60, 1 to 55, 1 to 50, 1 to 45, 1 to 40, 1 to 35, 1 to 30, 1 to 25, 1 to 20, 1 to 15, 1 to 10, 1 to 5, 5 to 100, 5 to 95, 5 to 90, 5 to 85, 5 to 80, 5 to 75, 5 to 70, 5 to 65, 5 to 60, 5 to 55, 5 to 50, 5 to 45, 5 to 40, 5 to 35, 5 to 30, 5 to 25, 5 to 20, 5 to 15, 5 to 10, 10 to 100, 10 to 95, 10 to 90, 10 to 85, 10 to 80, 10 to 75, 10 to 70, 10 to 65, 10 to 60, 10 to 55, 10 to 50, 10 to 45, 10 to 40, 10 to 35, 10 to 30, 10 to 25, 10 to 20, 10 to 15, 15 to 100, 15 to 95, 15 to 90, 15 to 85, 15 to 80, 15 to 75, 15 to 70, 15 to 65, 15 to 60, 15 to 55, 15 to 50, 15 to 45, 15 to 40, 15 to 35, 15 to 30, 15 to 25, 15 to 20, 20 to 100, 20 to 95, 20 to 90, 20 to 85, 20 to 80, 20 to 75, 20 to 70, 20 to 65, 20 to 60, 20 to 55, 20 to 50, 20 to 45, 20 to 40, 20 to 35, 20 to 30, 20 to 25, 25 to 100, 25 to 95, 25 to 90, 25 to 85, 25 to 80, 25 to 75, 25 to 70, 25 to 65, 25 to 60, 25 to 55, 25 to 50, 25 to 45, 25 to 40, 25 to 35, 25 to 30, 30 to 100, 30 to 95, 30 to 90, 30 to 85, 30 to 80, 30 to 75, 30 to 70, 30 to 65, 30 to 60, 30 to 55, 30 to 50, 30 to 45, 30 to 40, 30 to 35, 35 to 100, 35 to 95, 35 to 90, 35 to 85, 35 to 80, 35 to 75, 35 to 70, 35 to 65, 35 to 60, 35 to 55, 35 to 50, 35 to 45, 35 to 40, 40 to 100, 40 to 95, 40 to 90, 40 to 85, 40 to 80, 40 to 75, 40 to 70, 40 to 65, 40 to 60, 40 to 55, 40 to 50, 40 to 45, 45 to 100, 45 to 95, 45 to 90, 45 to 85, 45 to 80, 45 to 75, 45 to 70, 45 to 65, 45 to 60, 45 to 55, 45 to 50, 50 to 100, 50 to 95, 50 to 90, 50 to 85, 50 to 80, 50 to 75, 50 to 70, 50 to 65, 50 to 60, 50 to 55, 55 to 100, 55 to 95, 55 to 90, 55 to 85, 55 to 80, 55 to 75, 55 to 70, 55 to 65, 55 to 60, 60 to 100, 60 to 95, 60 to 90, 60 to 85, 60 to 80, 60 to 75, 60 to 70, 60 to 65, 65 to 100, 65 to 95, 65 to 90, 65 to 85, 65 to 80, 65 to 75, 65 to 70, 70 to 100, 70 to 95, 70 to 90, 70 to 85, 70 to 80, 70 to 75, 75 to 100, 75 to 95, 75 to 90, 75 to 85, 75 to 80, 80 to 100, 80 to 95, 80 to 90, 80 to 85, 85 to 100, 85 to 95, 85 to 90, 90 to 100, 90 to 95, or 95 to 100 weeks.

[0235] In some embodiments, the microbial compositions of the present disclosure are shelf stable at refrigeration temperatures (35-40° F.), at room temperature (68-72° F.), between 50-77° F., between −23-35° F., between 70-100° F., or between 101-213° F. for a period of about 1 to 36, about 1 to 34, about 1 to 32, about 1 to 30, about 1 to 28, about 1 to 26, about 1 to 24, about 1 to 22, about 1 to 20, about 1 to 18, about 1 to 16, about 1 to 14, about 1 to 12, about 1 to 10, about 1 to 8, about 1 to 6, about 1 one 4, about 1 to 2, about 4 to 36, about 4 to 34, about 4 to 32, about 4 to 30, about 4 to 28, about 4 to 26, about 4 to 24, about 4 to 22, about 4 to 20, about 4 to 18, about 4 to 16, about 4 to 14, about 4 to 12, about 4 to 10, about 4 to 8, about 4 to 6, about 6 to 36, about 6 to 34, about 6 to 32, about 6 to 30, about 6 to 28, about 6 to 26, about 6 to 24, about 6 to 22, about 6 to 20, about 6 to 18, about 6 to 16, about 6 to 14, about 6 to 12, about 6 to 10, about 6 to 8, about 8 to 36, about 8 to 34, about 8 to 32, about 8 to 30, about 8 to 28, about 8 to 26, about 8 to 24, about 8 to 22, about 8 to 20, about 8 to 18, about 8 to 16, about 8 to 14, about 8 to 12, about 8 to 10, about 10 to 36, about 10 to 34, about 10 to 32, about 10 to 30, about 10 to 28, about 10 to 26, about 10 to 24, about 10 to 22, about 10 to 20, about 10 to 18, about 10 to 16, about 10 to 14, about 10 to 12, about 12 to 36, about 12 to 34, about 12 to 32, about 12 to 30, about 12 to 28, about 12 to 26, about 12 to 24, about 12 to 22, about 12 to 20, about 12 to 18, about 12 to 16, about 12 to 14, about 14 to 36, about 14 to 34, about 14 to 32, about 14 to 30, about 14 to 28, about 14 to 26, about 14 to 24, about 14 to 22, about 14 to 20, about 14 to 18, about 14 to 16, about 16 to 36, about 16 to 34, about 16 to 32, about 16 to 30, about 16 to 28, about 16 to 26, about 16 to 24, about 16 to 22, about 16 to 20, about 16 to 18, about 18 to 36, about 18 to 34, about 18 to 32, about 18 to 30, about 18 to 28, about 18 to 26, about 18 to 24, about 18 to 22, about 18 to 20, about 20 to 36, about 20 to 34, about 20 to 32, about 20 to 30, about 20 to 28, about 20 to 26, about 20 to 24, about 20 to 22, about 22 to 36, about 22 to 34, about 22 to 32, about 22 to 30, about 22 to 28, about 22 to 26, about 22 to 24, about 24 to 36, about 24 to 34, about 24 to 32, about 24 to 30, about 24 to 28, about 24 to 26, about 26 to 36, about 26 to 34, about 26 to 32, about 26 to 30, about 26 to 28, about 28 to 36, about 28 to 34, about 28 to 32, about 28 to 30, about 30 to 36, about 30 to 34, about 30 to 32, about 32 to 36, about 32 to 34, or about 34 to 36 months.

[0236] In some embodiments, the microbial compositions of the present disclosure are shelf stable at refrigeration temperatures (35-40° F.), at room temperature (68-72° F.), between 50-77° F., between −23-35° F., between 70-100° F., or between 101-213° F. for a period of 1 to 36 1 to 34 1 to 32 1 to 30 1 to 28 1 to 26 1 to 24 1 to 22 1 to 20 1 to 18 1 to 16 1 to 14 1 to 12 1 to 10 1 to 8 1 to 6 1 one 4 1 to 2 4 to 36 4 to 34 4 to 32 4 to 30 4 to 28 4 to 26 4 to 24 4 to 22 4 to 20 4 to 184 to 164 to 144 to 124 to 10 4 to 8 4 to 6 6 to 36 6 to 34 6 to 32 6 to 30 6 to 28 6 to 26 6 to 24 6 to 22 6 to 20 6 to 186 to 166 to 146 to 126 to 10 6 to 8 8 to 36 8 to 34 8 to 32 8 to 30 8 to 28 8 to 26 8 to 24 8 to 22 8 to 20 8 to 18 8 to 16 8 to 14 8 to 12 8 to 10 10 to 36 10 to 34 10 to 32 10 to 30 10 to 28 10 to 26 10 to 24 10 to 22 10 to 20 10 to 18 10 to 16 10 to 14 10 to 12 12 to 36 12 to 34 12 to 32 12 to 30 12 to 28 12 to 26 12 to 24 12 to 22 12 to 20 12 to 18 12 to 16 12 to 14 14 to 36 14 to 34 14 to 32 14 to 30 14 to 28 14 to 26 14 to 24 14 to 22 14 to 20 14 to 18 14 to 16 16 to 36 16 to 34 16 to 32 16 to 30 16 to 28 16 to 26 16 to 24 16 to 22 16 to 20 16 to 18 18 to 36 18 to 34 18 to 32 18 to 30 18 to 28 18 to 26 18 to 24 18 to 22 18 to 20 20 to 36 20 to 34 20 to 32 20 to 30 20 to 28 20 to 26 20 to 24 20 to 22 22 to 36 22 to 34 22 to 32 22 to 30 22 to 28 22 to 26 22 to 24 24 to 36 24 to 34 24 to 32 24 to 30 24 to 28 24 to 26 26 to 36 26 to 34 26 to 32 26 to 30 26 to 28 28 to 36 28 to 34 28 to 32 28 to 30 30 to 36 30 to 34 30 to 32 32 to 36 32 to 34, or about 34 to 36.

[0237] In some embodiments, the microbial compositions of the present disclosure are shelf stable at any of the disclosed temperatures and/or temperature ranges and spans of time at a relative humidity of at least 1, 2, 3, 4, 5, 6, 7, 8, 9, 10, 11, 12, 13, 14, 15, 16, 17, 18, 19, 20, 21, 22, 23, 24, 25, 26, 27, 28, 29, 30, 31, 32, 33, 34, 35, 36, 37, 38, 39, 40, 41, 42, 43, 44, 45, 46, 47, 48, 49, 50, 51, 52, 53, 54, 55, 56, 57, 58, 59, 60, 61, 62, 63, 64, 65, 66, 67, 68, 69, 70, 71, 72, 73, 74, 75, 76, 77, 78, 79, 80, 81, 82, 83, 84, 85, 86, 87, 88, 89, 90, 91, 92, 93, 94, 95, 96, 97, or 98%.

### Encapsulated Compositions

[0238] In some embodiments, the microbes or microbial compositions of the disclosure are encapsulated in an encapsulating composition. An encapsulating composition protects the microbes from external stressors prior to entering the gastrointestinal tract of ungulates. Encapsulating compositions further create an environment that may be beneficial to the microbes, such as minimizing the oxidative stresses of an aerobic environment on anaerobic microbes. See Kalsta et al. (U.S. Pat. No. 5,104,662A), Ford (U.S. Pat. No. 5,733,568A), and Mosbach and Nilsson (U.S. Pat. No. 4,647,536A) for encapsulation compositions of microbes, and methods of encapsulating microbes.

[0239] In one embodiment, the encapsulating composition comprises microcapsules having a multiplicity of liquid cores encapsulated in a solid shell material. For purposes of the disclosure, a “multiplicity” of cores is defined as two or more.

[0240] A first category of useful fusible shell materials is that of normally solid fats, including fats which are already of suitable hardness and animal or vegetable fats and oils which are hydrogenated until their melting points are sufficiently high to serve the purposes of the present disclosure. Depending on the desired process and storage temperatures and the specific material selected, a particular fat can be either a normally solid or normally liquid material. The terms “normally solid” and “normally liquid” as used herein refer to the state of a material at desired temperatures for storing the resulting microcapsules. Since fats and hydrogenated oils do not, strictly speaking, have melting points, the term “melting point” is used herein to describe the minimum temperature at which the fusible material becomes sufficiently softened or liquid to be successfully emulsified and spray cooled, thus roughly corresponding to the maximum temperature at which the shell material has sufficient integrity to prevent release of the choline cores. “Melting point” is similarly defined herein for other materials which do not have a sharp melting point.

[0241] Specific examples of fats and oils useful herein (some of which require hardening) are as follows: animal oils and fats, such as beef tallow, mutton tallow, lamb tallow, lard or pork fat, fish oil, and sperm oil; vegetable oils, such as canola oil, cottonseed oil, peanut oil, corn oil, olive oil, soybean oil, sunflower oil, safflower oil, coconut oil, palm oil, linseed oil, tung oil, and castor oil; fatty acid monoglycerides and diglycerides; free fatty acids, such as stearic acid, palmitic acid, and oleic acid; and mixtures thereof. The above listing of oils and fats is not meant to be exhaustive, but only exemplary.

[0242] Specific examples of fatty acids include linoleic acid, γ-linoleic acid, dihomo-γ-linolenic acid, arachidonic acid, docosatetraenoic acid, vaccenic acid, nervonic acid, mead acid, erucic acid, gondoic acid, elaidic acid, oleic acid, palitoleic acid, stearidonic acid, eicosapentaenoic acid, valeric acid, caproic acid, enanthic acid, caprylic acid, pelargonic acid, capric acid, undecylic acid, lauric acid, tridecylic acid, myristic acid, pentadecylic acid, palmitic acid, margaric acid, stearic acid, nonadecyclic acid, arachidic acid, heneicosylic acid, behenic acid, tricosylic acid, lignoceric acid, pentacosylic acid, cerotic acid, heptacosylic acid, montanic acid, nonacosylic acid, melissic acid, henatriacontylic acid, lacceroic acid, psyllic acid, geddic acid, ceroplastic acid, hexatriacontylic acid, heptatriacontanoic acid, and octatriacontanoic acid.

[0243] Another category of fusible materials useful as encapsulating shell materials is that of waxes. Representative waxes contemplated for use herein are as follows: animal waxes, such as beeswax, lanolin, shell wax, and Chinese insect wax; vegetable waxes, such as carnauba, candelilla, bayberry, and sugar cane; mineral waxes, such as paraffin, microcrystalline petroleum, ozocerite, ceresin, and montan; synthetic waxes, such as low molecular weight polyolefin (e.g., CARBOWAX), and polyol ether-esters (e.g., sorbitol); Fischer-Tropsch process synthetic waxes; and mixtures thereof. Water-soluble waxes, such as CARBOWAX and sorbitol, are not contemplated herein if the core is aqueous.

[0244] Still other fusible compounds useful herein are fusible natural resins, such as rosin, balsam, shellac, and mixtures thereof.

[0245] Various adjunct materials are contemplated for incorporation in fusible materials according to the present disclosure. For example, antioxidants, light stabilizers, dyes and lakes, flavors, essential oils, anti-caking agents, fillers, pH stabilizers, sugars (monosaccharides, disaccharides, trisaccharides, and polysaccharides) and the like can be incorporated in the fusible material in amounts which do not diminish its utility for the present disclosure.

[0246] The core material contemplated herein constitutes from about 0.10% to about 50%, about 1% to about 35%. or about 5% to about 30% by weight of the microcapsules. In some embodiments, the core material contemplated herein constitutes no more than about 30% by weight of the microcapsules. In some embodiments, the core material contemplated herein constitutes about 5% by weight of the microcapsules. The core material is contemplated as either a liquid or solid at contemplated storage temperatures of the microcapsules.

[0247] The cores may include other additives well-known in the pharmaceutical art, including edible sugars, such as sucrose, glucose, maltose, fructose, lactose, cellobiose, monosaccharides, disaccharides, trisaccharides, polysaccharides, and mixtures thereof; artificial sweeteners, such as aspartame, saccharin, cyclamate salts, and mixtures thereof; edible acids, such as acetic acid (vinegar), citric acid, ascorbic acid, tartaric acid, and mixtures thereof; edible starches, such as corn starch; hydrolyzed vegetable protein; water-soluble vitamins, such as Vitamin C; water-soluble medicaments; water-soluble nutritional materials, such as ferrous sulfate; flavors; salts; monosodium glutamate; antimicrobial agents, such as sorbic acid; antimycotic agents, such as potassium sorbate, sorbic acid, sodium benzoate, and benzoic acid; food grade pigments and dyes; and mixtures thereof. Other potentially useful supplemental core materials will be apparent to those of ordinary skill in the art.

[0248] Emulsifying agents may be employed to assist in the formation of stable emulsions. Representative emulsifying agents include glyceryl monostearate, polysorbate esters, ethoxylated mono- and diglycerides, and mixtures thereof.

[0249] For ease of processing, and particularly to enable the successful formation of a reasonably stable emulsion, the viscosities of the core material and the shell material should be similar at the temperature at which the emulsion is formed. In particular, the ratio of the viscosity of the shell to the viscosity of the core, expressed in centipoise or comparable units, and both measured at the temperature of the emulsion, should be from about 22:1 to about 1:1, desirably from about 8:1 to about 1:1, and preferably from about 3:1 to about 1:1. A ratio of 1:1 would be ideal, but a viscosity ratio within the recited ranges is useful.

[0250] Encapsulating compositions are not limited to microcapsule compositions as disclosed above. In some embodiments encapsulating compositions encapsulate the microbial compositions in an adhesive polymer that can be natural or synthetic without toxic effect. In some embodiments, the encapsulating composition may be a matrix selected from sugar matrix, gelatin matrix, polymer matrix, silica matrix, starch matrix, foam matrix, etc. In some embodiments, the encapsulating composition may be selected from polyvinyl acetates; polyvinyl acetate copolymers; ethylene vinyl acetate (EVA) copolymers; polyvinyl alcohols; polyvinyl alcohol copolymers; celluloses, including ethylcelluloses, methylcelluloses, hydroxymethylcelluloses, hydroxypropylcelluloses and carboxymethylcellulose; polyvinylpyrolidones; polysaccharides, including starch, modified starch, dextrins, maltodextrins, alginate and chitosans; monosaccharides; fats; fatty acids, including oils; proteins, including gelatin and zeins; gum arabics; shellacs; vinylidene chloride and vinylidene chloride copolymers; calcium lignosulfonates; acrylic copolymers; polyvinylacrylates; polyethylene oxide; acrylamide polymers and copolymers; polyhydroxyethyl acrylate, methylacrylamide monomers; and polychloroprene.

[0251] In some embodiments, the encapsulating shell of the present disclosure can be up to 10 μm, 20 μm, 30 μm, 40 μm, 50 μm, 60 μm, 70 μm, 80 μm, 90 μm, 100 μm, 110 μm, 120 μm, 130 μm, 140 μm, 150 μm, 160 μm, 170 μm, 180 μm, 190 μm, 200 μm, 210 μm, 220 μm, 230 μm, 240 μm, 250 μm, 260 μm, 270 μm, 280 μm, 290 μm, 300 μm, 310 μm, 320 μm, 330 μm, 340 μm, 350 μm, 360 μm, 370 μm, 380 μm, 390 μm, 400 μm, 410 μm, 420 μm, 430 μm, 440 μm, 450 μm, 460 μm, 470 μm, 480 μm, 490 μm, 500 μm, 510 μm, 520 μm, 530 μm, 540 μm, 550 μm, 560 μm, 570 μm, 580 μm, 590 μm, 600 μm, 610 μm, 620 μm, 630 μm, 640 μm, 650 μm, 660 μm, 670 μm, 680 μm, 690 μm, 700 μm, 710 μm, 720 μm, 730 μm, 740 μm, 750 μm, 760 μm, 770 μm, 780 μm, 790 μm, 800 μm, 810 μm, 820 μm, 830 μm, 840 μm, 850 μm, 860 μm, 870 μm, 880 μm, 890 μm, 900 μm, 910 μm, 920 μm, 930 μm, 940 μm, 950 μm, 960 μm, 970 μm, 980 μm, 990 μm, 1000 μm, 1010 μm, 1020 μm, 1030 μm, 1040 μm, 1050 μm, 1060 μm, 1070 μm, 1080 μm, 1090 μm, 1100 μm, 1110 μm, 1120 μm, 1130 μm, 1140 μm, 1150 μm, 1160 μm, 1170 μm, 1180 μm, 1190 μm, 1200 μm, 1210 μm, 1220 μm, 1230 μm, 1240 μm, 1250 μm, 1260 μm, 1270 μm, 1280 μm, 1290 μm, 1300 μm, 1310 μm, 1320 μm, 1330 μm, 1340 μm, 1350 μm, 1360 μm, 1370 μm, 1380 μm, 1390 μm, 1400 μm, 1410 μm, 1420 μm, 1430 μm, 1440 μm, 1450 μm, 1460 μm, 1470 μm, 1480 μm, 1490 μm, 1500 μm, 1510 μm, 1520 μm, 1530 μm, 1540 μm, 1550 μm, 1560 μm, 1570 μm, 1580 μm, 1590 μm, 1600 μm, 1610 μm, 1620 μm, 1630 μm, 1640 μm, 1650 μm, 1660 μm, 1670 μm, 1680 μm, 1690 μm, 1700 μm, 1710 μm, 1720 μm, 1730 μm, 1740 μm, 1750 μm, 1760 μm, 1770 μm, 1780 μm, 1790 μm, 1800 μm, 1810 μm, 1820 μm, 1830 μm, 1840 μm, 1850 μm, 1860 μm, 1870 μm, 1880 μm, 1890 μm, 1900 μm, 1910 μm, 1920 μm, 1930 μm, 1940 μm, 1950 μm, 1960 μm, 1970 μm, 1980 μm, 1990 μm, 2000 μm, 2010 μm, 2020 μm, 2030 μm, 2040 μm, 2050 μm, 2060 μm, 2070 μm, 2080 μm, 2090 μm, 2100 μm, 2110 μm, 2120 μm, 2130 μm, 2140 μm, 2150 μm, 2160 μm, 2170 μm, 2180 μm, 2190 μm, 2200 μm, 2210 μm, 2220 μm, 2230 μm, 2240 μm, 2250 μm, 2260 μm, 2270 μm, 2280 μm, 2290 μm, 2300 μm, 2310 μm, 2320 μm, 2330 μm, 2340 μm, 2350 μm, 2360 μm, 2370 μm, 2380 μm, 2390 μm, 2400 μm, 2410 μm, 2420 μm, 2430 μm, 2440 μm, 2450 μm, 2460 μm, 2470 μm, 2480 μm, 2490 μm, 2500 μm, 2510 μm, 2520 μm, 2530 μm, 2540 μm, 2550 μm, 2560 μm, 2570 μm, 2580 μm, 2590 μm, 2600 μm, 2610 μm, 2620 μm, 2630 μm, 2640 μm, 2650 μm, 2660 μm, 2670 μm, 2680 μm, 2690 μm, 2700 μm, 2710 μm, 2720 μm, 2730 μm, 2740 μm, 2750 μm, 2760 μm, 2770 μm, 2780 μm, 2790 μm, 2800 μm, 2810 μm, 2820 μm, 2830 μm, 2840 μm, 2850 μm, 2860 μm, 2870 μm, 2880 μm, 2890 μm, 2900 μm, 2910 μm, 2920 μm, 2930 μm, 2940 μm, 2950 μm, 2960 μm, 2970 μm, 2980 μm, 2990 μm, or 3000 μm thick.

### Animal Feed

[0252] In some embodiments, compositions of the present disclosure are mixed with animal feed. In some embodiments, animal feed may be present in various forms such as pellets, capsules, granulated, powdered, liquid, or semi-liquid.

[0253] In some embodiments, compositions of the present disclosure are mixed into the premix at at the feed mill (e.g., Carghill or Western Millin), alone as a standalone premix, and/or alongside other feed additives such as MONENSIN, vitamins, etc. In one embodiment, the compositions of the present disclosure are mixed into the feed at the feed mill. In another embodiment, compositions of the present disclosure are mixed into the feed itself.

[0254] In some embodiments, feed of the present disclosure may be supplemented with water, premix or premixes, forage, fodder, beans (e.g., whole, cracked, or ground), grains (e.g., whole, cracked, or ground), bean- or grain-based oils, bean- or grain-based meals, bean- or grain-based haylage or silage, bean- or grain-based syrups, fatty acids, sugar alcohols (e.g., polyhydric alcohols), commercially available formula feeds, and mixtures thereof.

[0255] In some embodiments, forage encompasses hay, haylage, and silage. In some embodiments, hays include grass hays (e.g., sudangrass, orchardgrass, or the like), alfalfa hay, and clover hay. In some embodiments, haylages include grass haylages, sorghum haylage, and alfalfa haylage. In some embodiments, silages include maize, oat, wheat, alfalfa, clover, and the like.

[0256] In some embodiments, premix or premixes may be utilized in the feed. Premixes may comprise micro-ingredients such as vitamins, minerals, amino acids; chemical preservatives; pharmaceutical compositions such as antibiotics and other medicaments; fermentation products, and other ingredients. In some embodiments, premixes are blended into the feed.

[0257] In some embodiments, the feed may include feed concentrates such as soybean hulls, sugar beet pulp, molasses, high protein soybean meal, ground corn, shelled corn, wheat midds, distiller grain, cottonseed hulls, rumen-bypass protein, rumen-bypass fat, and grease. See Luhman (U.S. Publication US20150216817A1), Anderson el al. (U.S. Pat. No. 3,484,243) and Porter and Luhman (U.S. Pat. No. 9,179,694B2) for animal feed and animal feed supplements capable of use in the present compositions and methods.

[0258] In some embodiments, feed occurs as a compound, which includes, in a mixed composition capable of meeting the basic dietary needs, the feed itself, vitamins, minerals, amino acids, and other necessary components. Compound feed may further comprise premixes.

[0259] In some embodiments, microbial compositions of the present disclosure may be mixed with animal feed, premix, and/or compound feed. Individual components of the animal feed may be mixed with the microbial compositions prior to feeding to ruminants. The microbial compositions of the present disclosure may be applied into or on a premix, into or on a feed, and/or into or on a compound feed.

### Administration of Microbial Compositions

[0260] In some embodiments, the microbial compositions of the present disclosure are administered to ruminants via the oral route. In some embodiments the microbial compositions are administered via a direct injection route into the gastrointestinal tract. In further embodiments, the direct injection administration delivers the microbial compositions directly to the rumen. In some embodiments, the microbial compositions of the present disclosure are administered to animals anally. In further embodiments, anal administration is in the form of an inserted suppository.

[0261] In some embodiments, the microbial composition is administered in a dose comprise a total of, or at least, 1 mL, 2 mL, 3 mL, 4 mL, 5 mL, 6 mL, 7 mL, 8 mL, 9 mL, 10 mL, 11 mL, 12 mL, 13 mL, 14 mL, 15 mL, 16 mL, 17 mL, 18 mL, 19 mL, 20 mL, 21 mL, 22 mL, 23 mL, 24 mL, 25 mL, 26 mL, 27 mL, 28 mL, 29 mL, 30 mL, 31 mL, 32 mL, 33 mL, 34 mL, 35 mL, 36 mL, 37 mL, 38 mL, 39 mL, 40 mL, 41 mL, 42 mL, 43 mL, 44 mL, 45 mL, 46 mL, 47 mL, 48 mL, 49 mL, 50 mL, 60 mL, 70 mL, 80 mL, 90 mL, 100 mL, 200 mL, 300 mL, 400 mL, 500 mL, 600 mL, 700 mL, 800 mL, 900 mL, or 1,000 mL.

[0262] In some embodiments, the microbial composition is administered in a dose comprising a total of, or at least, 10¹⁸, 10¹⁷, 10¹⁶, 10¹⁵, 10¹⁴, 10¹³, 10¹², 10¹¹, 10¹⁰, 10⁹, 10⁸, 10⁷, 10⁶, 10⁵, 10⁴, 10³, or 10² microbial cells.

[0263] In some embodiments, the microbial compositions are mixed with feed, and the administration occurs through the ingestion of the microbial compositions along with the feed. In some embodiments, the dose of the microbial composition is administered such that there exists 10² to 10¹², 10³ to 10¹², 10⁴ to 10¹², 10⁵ to 10¹², 10⁶ to 10¹², 10⁷ to 10¹², 10⁸ to 10¹², 10⁹ to 10¹², 10¹⁰ to 10¹², 10¹¹ to 10¹², 10² to 10¹¹, 10³ to 10¹¹, 10⁴ to 10¹¹, 10⁵ to 10¹¹, 10⁶ to 10¹¹, 10⁷ to 10¹¹, 10⁸ to 10¹¹, 10⁹ to 10¹¹, 10¹⁰ to 10¹¹, 10² to 10¹⁰, 10³ to 10¹⁰, 10⁴ to 10¹⁰, 10⁵ to 10¹⁰, 10⁶ to 10¹⁰, 10⁷ to 10¹⁰, 10⁸ to 10¹⁰, 10⁹ to 10¹⁰, 10² to 10⁹, 10³ to 10⁹, 10⁴ to 10⁹, 10⁵ to 10⁹, 10⁶ to 10⁹, 10⁷ to 10⁹, 10⁸ to 10⁹, 10² to 10⁸, 10³ to 10⁸, 10⁴ to 10⁸, 10⁵ to 10⁸, 10⁶ to 10⁸, 10⁷ to 10⁸, 10² to 10⁷, 10³ to 10⁷, 10⁴ to 10⁷, 10⁵ to 10⁷, 10⁶ to 10⁷, 10² to 10⁶, 10³ to 10⁶, 10⁴ to 10⁶, 10⁵ to 10⁶, 10² to 10⁵, 10³ to 10⁵, 10⁴ to 10⁵, 10² to 10⁴, 10³ to 10⁴, 10² to 10³, 10¹², 10¹¹, 10¹⁰, 10⁹, 10⁸, 10⁷, 10⁶, 10⁵, 10⁴, 10³, or 10² total microbial cells per gram or milliliter of the composition.

[0264] In some embodiments, the microbial compositions are mixed with feed, and the administration occurs through the ingestion of the microbial compositions along with the feed. In some embodiments, the dose of the microbial composition is administered such that there exists 10² to 10¹², 10³ to 10¹², 10⁴ to 10¹², 10⁵ to 10¹², 10⁶ to 10¹², 10⁷ to 10¹², 10⁸ to 10¹², 10⁹ to 10¹², 10¹⁰ to 10¹², 10¹¹ to 10¹², 10² to 10¹¹, 10³ to 10¹¹, 10⁴ to 10¹¹, 10⁵ to 10¹¹, 10⁶ to 10¹¹, 10⁷ to 10¹¹, 10⁸ to 10¹¹, 10⁹ to 10¹¹, 10¹⁰ to 10¹¹, 10² to 10¹⁰, 10³ to 10¹⁰, 10⁴ to 10¹⁰, 10⁵ to 10¹⁰, 10⁶ to 10¹⁰, 10⁷ to 10¹⁰, 10⁸ to 10¹⁰, 10⁹ to 10¹⁰, 10² to 10⁹, 10³ to 10⁹, 10⁴ to 10⁹, 10⁵ to 10⁹, 10⁶ to 10⁹, 10⁷ to 10⁹, 10⁸ to 10⁹, 10² to 10⁸, 10³ to 10⁸, 10⁴ to 10⁸, 10⁵ to 10⁸, 10⁶ to 10⁸, 10⁷ to 10⁸, 10² to 10⁷, 10³ to 10⁷, 10⁴ to 10⁷, 10⁵ to 10⁷, 10⁶ to 10⁷, 10² to 10⁶, 10³ to 10⁶, 10⁴ to 10⁶, 10⁵ to 10⁶, 10² to 10⁵, 10³ to 10⁵, 10⁴ to 10⁵, 10² to 10⁴, 10³ to 10⁴, 10² to 10³, 10¹², 10¹¹, 10¹⁰, 10⁹, 10⁸, 10⁷, 10⁶, 10⁵, 10⁴, 10³, or 10² colony forming units per gram or milliliter of the composition.

[0265] In some embodiments, the administered dose of the microbial composition comprises 10² to 10¹⁸, 10³ to 10¹⁸, 10⁴ to 10¹⁸, 10⁵ to 10¹⁸, 10⁶ to 10¹⁸, 10⁷ to 10¹⁸, 10⁸ to 10¹⁸, 10⁹ to 10¹⁸, 10¹⁰ to 10¹⁸, 10¹¹ to 10¹⁸, 10¹² to 10¹⁸, 10¹³ to 10¹⁸, 10¹⁴ to 10¹⁸, 10¹⁵ to 10¹⁸, 10¹⁶ to 10¹⁸, 10¹⁷ to 10¹⁸, 10² to 10¹², 10³ to 10¹², 10⁴ to 10¹², 10⁵ to 10¹², 10⁶ to 10¹², 10⁷ to 10¹², 10⁸ to 10¹², 10⁹ to 10¹², 10¹⁰ to 10¹², 10¹¹ to 10¹², 10² to 10¹¹, 10³ to 10¹¹, 10⁴ to 10¹¹, 10⁵ to 10¹¹, 10⁶ to 10¹¹, 10⁷ to 10¹¹, 10⁸ to 10¹¹, 10⁹ to 10¹¹, 10¹⁰ to 10¹¹, 10² to 10¹⁰, 10³ to 10¹⁰, 10⁴ to 10¹⁰, 10⁵ to 10¹⁰, 10⁶ to 10¹⁰, 10⁷ to 10¹⁰, 10⁸ to 10¹⁰, 10⁹ to 10¹⁰, 10² to 10⁹, 10³ to 10⁹, 10⁴ to 10⁹, 10⁵ to 10⁹, 10⁶ to 10⁹, 10⁷ to 10⁹, 10⁸ to 10⁹, 10² to 10¹, 10³ to 10⁸, 10⁴ to 10⁸, 10⁵ to 10⁸, 10⁶ to 10¹, 10⁷ to 10⁸, 10² to 10⁷, 10³ to 10⁷, 10⁴ to 10⁷, 10⁵ to 10⁷, 10⁶ to 10⁷, 10² to 10⁶, 10³ to 10⁶, 10⁴ to 10⁶, 10⁵ to 10⁶, 10² to 10⁰, 10³ to 10⁰, 10⁴ to 10⁵, 10² to 10⁴, 10³ to 10⁴, 10² to 10³, 10¹⁸, 10¹⁷, 10¹⁶, 10¹⁵, 10¹⁴, 10¹³, 10¹², 10¹¹, 10¹⁰, 10⁹, 10⁸, 10⁷, 10⁶, 10⁵, 10⁴, 10³, or 10² total microbial cells.

[0266] In some embodiments, the administered dose of each microbe in the microbial composition is at least about, at least about 10³ colony forming units (CFU), at least about 10⁴ CFU, at least about 10⁵ CFU, at least about 10⁶ CFU, at least about 10⁷ CFU, at least about 10⁸ CFU, at least about 10⁹ CFU, at least about 10¹⁰ CFU, at least about 10¹¹ CFU, at least about 10¹² CFU, at least about 10¹³ CFU, at least about 10¹⁴ CFU, at least about 10¹⁵ CFU, at least about 10¹⁶ CFU, at least about 10¹⁷ CFU, at least about 10¹⁸ CFU, at least about 10¹⁹ CFU, or at least about 10²⁰ CFU.

[0267] In some embodiments, the composition is administered 1 or more times per day. In some aspects, the composition is administered with food each time the animal is fed. In some embodiments, the composition is administered 1 to 10, 1 to 9, 1 to 8, 1 to 7, 1 to 6, 1 to 5, 1 to 4, 1 to 3, 1 to 2, 2 to 10, 2 to 9, 2 to 8, 2 to 7, 2 to 6, 2 to 5, 2 to 4, 2 to 3, 3 to 10, 3 to 9, 3 to 8, 3 to 7, 3 to 6, 3 to 5, 3 to 4, 4 to 10, 4 to 9, 4 to 8, 4 to 7, 4 to 6, 4 to 5, 5 to 10, 5 to 9, 5 to 8, 5 to 7, 5 to 6, 6 to 10, 6 to 9, 6 to 8, 6 to 7, 7 to 10, 7 to 9, 7 to 8, 8 to 10, 8 to 9, 9 to 10, 1, 2, 3, 4, 5, 6, 7, 8, 9, or 10 times per day.

[0268] In some embodiments, the microbial composition is administered 1 to 10, 1 to 9, 1 to 8, 1 to 7, 1 to 6, 1 to 5, 1 to 4, 1 to 3, 1 to 2, 2 to 10, 2 to 9, 2 to 8, 2 to 7, 2 to 6, 2 to 5, 2 to 4, 2 to 3, 3 to 10, 3 to 9, 3 to 8, 3 to 7, 3 to 6, 3 to 5, 3 to 4, 4 to 10, 4 to 9, 4 to 8, 4 to 7, 4 to 6, 4 to 5, 5 to 10, 5 to 9, 5 to 8, 5 to 7, 5 to 6, 6 to 10, 6 to 9, 6 to 8, 6 to 7, 7 to 10, 7 to 9, 7 to 8, 8 to 10, 8 to 9, 9 to 10, 1, 2, 3, 4, 5, 6, 7, 8, 9, or 10 times per week.

[0269] In some embodiments, the microbial composition is administered 1 to 10, 1 to 9, 1 to 8, 1 to 7, 1 to 6, 1 to 5, 1 to 4, 1 to 3, 1 to 2, 2 to 10, 2 to 9, 2 to 8, 2 to 7, 2 to 6, 2 to 5, 2 to 4, 2 to 3, 3 to 10, 3 to 9, 3 to 8, 3 to 7, 3 to 6, 3 to 5, 3 to 4, 4 to 10, 4 to 9, 4 to 8, 4 to 7, 4 to 6, 4 to 5, 5 to 10, 5 to 9, 5 to 8, 5 to 7, 5 to 6, 6 to 10, 6 to 9, 6 to 8, 6 to 7, 7 to 10, 7 to 9, 7 to 8, 8 to 10, 8 to 9, 9 to 10, 1, 2, 3, 4, 5, 6, 7, 8, 9, or 10 times per month.

[0270] In some embodiments, the microbial composition is administered 1 to 10, 1 to 9, 1 to 8, 1 to 7, 1 to 6, 1 to 5, 1 to 4, 1 to 3, 1 to 2, 2 to 10, 2 to 9, 2 to 8, 2 to 7, 2 to 6, 2 to 5, 2 to 4, 2 to 3, 3 to 10, 3 to 9, 3 to 8, 3 to 7, 3 to 6, 3 to 5, 3 to 4, 4 to 10, 4 to 9, 4 to 8, 4 to 7, 4 to 6, 4 to 5, 5 to 10, 5 to 9, 5 to 8, 5 to 7, 5 to 6, 6 to 10, 6 to 9, 6 to 8, 6 to 7, 7 to 10, 7 to 9, 7 to 8, 8 to 10, 8 to 9, 9 to 10, 1, 2, 3, 4, 5, 6, 7, 8, 9, or 10 times per year.

[0271] In some embodiments, the feed can be uniformly coated with one or more layers of the microbes and/or microbial compositions disclosed herein, using conventional methods of mixing, spraying, or a combination thereof through the use of treatment application equipment that is specifically designed and manufactured to accurately, safely, and efficiently apply coatings. Such equipment uses various types of coating technology such as rotary coaters, drum coaters, fluidized bed techniques, spouted beds, rotary mists, or a combination thereof. Liquid treatments such as those of the present disclosure can be applied via either a spinning “atomizer” disk or a spray nozzle, which evenly distributes the microbial composition onto the feed as it moves though the spray pattern. In some aspects, the feed is then mixed or tumbled for an additional period of time to achieve additional treatment distribution and drying.

[0272] In some embodiments, the feed coats of the present disclosure can be up to 10 μm, 20 μm, 30 μm, 40 μm, 50 μm, 60 μm, 70 μm, 80 μm, 90 μm, 100 μm, 110 μm, 120 μm, 130 μm, 140 μm, 150 μm, 160 μm, 170 μm, 180 μm, 190 μm, 200 μm, 210 μm, 220 μm, 230 μm, 240 μm, 250 μm, 260 μm, 270 μm, 280 μm, 290 μm, 300 μm, 310 μm, 320 μm, 330 μm, 340 μm, 350 μm, 360 μm, 370 μm, 380 μm, 390 μm, 400 μm, 410 μm, 420 μm, 430 μm, 440 μm, 450 μm, 460 μm, 470 μm, 480 μm, 490 μm, 500 μm, 510 μm, 520 μm, 530 μm, 540 μm, 550 μm, 560 μm, 570 μm, 580 μm, 590 μm, 600 μm, 610 μm, 620 μm, 630 μm, 640 μm, 650 μm, 660 μm, 670 μm, 680 μm, 690 μm, 700 μm, 710 μm, 720 μm, 730 μm, 740 μm, 750 μm, 760 μm, 770 μm, 780 μm, 790 μm, 800 μm, 810 μm, 820 μm, 830 μm, 840 μm, 850 μm, 860 μm, 870 μm, 880 μm, 890 μm, 900 μm, 910 μm, 920 μm, 930 μm, 940 μm, 950 μm, 960 μm, 970 μm, 980 μm, 990 μm, 1000 μm, 1010 μm, 1020 μm, 1030 μm, 1040 μm, 1050 μm, 1060 μm, 1070 μm, 1080 μm, 1090 μm, 1100 μm, 1110 μm, 1120 μm, 1130 μm, 1140 μm, 1150 μm, 1160 μm, 1170 μm, 1180 μm, 1190 μm, 1200 μm, 1210 μm, 1220 μm, 1230 μm, 1240 μm, 1250 μm, 1260 μm, 1270 μm, 1280 μm, 1290 μm, 1300 μm, 1310 μm, 1320 μm, 1330 μm, 1340 μm, 1350 μm, 1360 μm, 1370 μm, 1380 μm, 1390 μm, 1400 μm, 1410 μm, 1420 μm, 1430 μm, 1440 μm, 1450 μm, 1460 μm, 1470 μm, 1480 μm, 1490 μm, 1500 μm, 1510 μm, 1520 μm, 1530 μm, 1540 μm, 1550 μm, 1560 μm, 1570 μm, 1580 μm, 1590 μm, 1600 μm, 1610 μm, 1620 μm, 1630 μm, 1640 μm, 1650 μm, 1660 μm, 1670 μm, 1680 μm, 1690 μm, 1700 μm, 1710 μm, 1720 μm, 1730 μm, 1740 μm, 1750 μm, 1760 μm, 1770 μm, 1780 μm, 1790 μm, 1800 μm, 1810 μm, 1820 μm, 1830 μm, 1840 μm, 1850 μm, 1860 μm, 1870 μm, 1880 μm, 1890 μm, 1900 μm, 1910 μm, 1920 μm, 1930 μm, 1940 μm, 1950 μm, 1960 μm, 1970 μm, 1980 μm, 1990 μm, 2000 μm, 2010 μm, 2020 μm, 2030 μm, 2040 μm, 2050 μm, 2060 μm, 2070 μm, 2080 μm, 2090 μm, 2100 μm, 2110 μm, 2120 μm, 2130 μm, 2140 μm, 2150 μm, 2160 μm, 2170 μm, 2180 μm, 2190 μm, 2200 μm, 2210 μm, 2220 μm, 2230 μm, 2240 μm, 2250 μm, 2260 μm, 2270 μm, 2280 μm, 2290 μm, 2300 μm, 2310 μm, 2320 μm, 2330 μm, 2340 μm, 2350 μm, 2360 μm, 2370 μm, 2380 μm, 2390 μm, 2400 μm, 2410 μm, 2420 μm, 2430 μm, 2440 μm, 2450 μm, 2460 μm, 2470 μm, 2480 μm, 2490 μm, 2500 μm, 2510 μm, 2520 μm, 2530 μm, 2540 μm, 2550 μm, 2560 μm, 2570 μm, 2580 μm, 2590 μm, 2600 μm, 2610 μm, 2620 μm, 2630 μm, 2640 μm, 2650 μm, 2660 μm, 2670 μm, 2680 μm, 2690 μm, 2700 μm, 2710 μm, 2720 μm, 2730 μm, 2740 μm, 2750 μm, 2760 μm, 2770 μm, 2780 μm, 2790 μm, 2800 μm, 2810 μm, 2820 μm, 2830 μm, 2840 μm, 2850 μm, 2860 μm, 2870 μm, 2880 μm, 2890 μm, 2900 μm, 2910 μm, 2920 μm, 2930 μm, 2940 μm, 2950 μm, 2960 μm, 2970 μm, 2980 μm, 2990 μm, or 3000 μm thick.

[0273] In some embodiments, the microbial cells can be coated freely onto any number of compositions or they can be formulated in a liquid or solid composition before being coated onto a composition. For example, a solid composition comprising the microorganisms can be prepared by mixing a solid carrier with a suspension of the spores until the solid carriers are impregnated with the spore or cell suspension. This mixture can then be dried to obtain the desired particles.

[0274] In some other embodiments, it is contemplated that the solid or liquid microbial compositions of the present disclosure further contain functional agents e.g., activated carbon, minerals, vitamins, and other agents capable of improving the quality of the products or a combination thereof.

[0275] Methods of coating and compositions in use of said methods that are known in the art can be particularly useful when they are modified by the addition of one of the embodiments of the present disclosure. Such coating methods and apparatus for their application are disclosed in, for example: U.S. Pat. Nos. 8,097,245, and 7,998,502; and PCT Pat. App. Publication Nos. WO 2008/076975, WO 2010/138522, WO 2011/094469, WO 2010/111347, and WO 2010/111565 each of which is incorporated by reference herein.

[0276] In some embodiments, the microbes or microbial consortia of the present disclosure exhibit a synergistic effect, on one or more of the traits described herein, in the presence of one or more of the microbes or consortia coming into contact with one another. The synergistic effect obtained by the taught methods can be quantified, for example, according to Colby's formula (i.e., (E)=X+Y−(X*Y/100)). See Colby, R. S., “Calculating Synergistic and Antagonistic Responses of Herbicide Combinations,” 1967. Weeds. Vol. 15, pp. 20-22, incorporated herein by reference in its entirety. Thus, “synergistic” is intended to reflect an outcome/parameter/effect that has been increased by more than an additive amount.

[0277] In some embodiments, the microbes or microbial consortia of the present disclosure may be administered via bolus. In one embodiment, a bolus (e.g., capsule containing the composition) is inserted into a bolus gun, and the bolus gun is inserted into the buccal cavity and/or esophagus of the animal, followed by the release/injection of the bolus into the animal's digestive tract. In one embodiment, the bolus gun/applicator is a BOVIKALC bolus gun/applicator. In another embodiment, the bolus gun/applicator is a QUADRICAL gun/applicator.

[0278] In some embodiments, the microbes or microbial consortia of the present disclosure may be administered via drench. In one embodiment, the drench is an oral drench. A drench administration comprises utilizing a drench kit/applicator/syringe that injects/releases a liquid comprising the microbes or microbial consortia into the buccal cavity and/or esophagus of the animal.

[0279] In some embodiments, the microbes or microbial consortia of the present disclosure may be administered in a time-released fashion. The composition may be coated in a chemical composition, or may be contained in a mechanical device or capsule that releases the microbes or microbial consortia over a period of time instead all at once. In one embodiment, the microbes or microbial consortia are administered to an animal in a time-release capsule. In one embodiment, the composition may be coated in a chemical composition, or may be contained in a mechanical device or capsule that releases the microbes or microbial consortia all at once a period of time hours post ingestion.

[0280] In some embodiments, the microbes or microbial consortia are administered in a time-released fashion between 1 to 5, 1 to 10, 1 to 15, 1 to 20, 1 to 24, 1 to 25, 1 to 30, 1 to 35, 1 to 40, 1 to 45, 1 to 50, 1 to 55, 1 to 60, 1 to 65, 1 to 70, 1 to 75, 1 to 80, 1 to 85, 1 to 90, 1 to 95, or 1 to 100 hours.

[0281] In some embodiments, the microbes or microbial consortia are administered in a time-released fashion between 1 to 2, 1 to 3, 1 to 4, 1 to 5, 1 to 6, 1 to 7, 1 to 8, 1 to 9, 1 to 10, 1 to 11, 1 to 12, 1 to 13, 1 to 14, 1 to 15, 1 to 16, 1 to 17, 1 to 18, 1 to 19, 1 to 20, 1 to 21, 1 to 22, 1 to 23, 1 to 24, 1 to 25, 1 to 26, 1 to 27, 1 to 28, 1 to 29, or 1 to 30 days.

### Microorganisms

[0282] As used herein the term “microorganism” should be taken broadly. It includes, but is not limited to, the two prokaryotic domains, Bacteria and Archaea, as well as eukaryotic fungi, protists, and viruses.

[0283] By way of example, the microorganisms may include species of the genera of: Clostridium, Ruminococcus, Roseburia, Hydrogenoanaerobacterium, Saccharofermentans, Papillibacter, Pelotomaculum, Butyricicoccus, Tannerella, Prevotella, Butyricimonas, Piromyces, Pichia, Candida, Vrystaatia, Orpinomyces, Neocallimastix, and Phyllosticta. The microorganisms may further include species belonging to the family of Lachnospiraceae, and the order of Saccharomycetales. In some embodiments, the microorganisms may include species of any genera disclosed herein.

[0284] In certain embodiments, the microorganism is unculturable. This should be taken to mean that the microorganism is not known to be culturable or is difficult to culture using methods known to one skilled in the art.

[0285] In one embodiment, the microbes are obtained from animals (e.g., mammals, reptiles, birds, and the like), soil (e.g., rhizosphere), air, water (e.g., marine, freshwater, wastewater sludge), sediment, oil, plants (e.g., roots, leaves, stems), agricultural products, and extreme environments (e.g., acid mine drainage or hydrothermal systems). In a further embodiment, microbes obtained from marine or freshwater environments such as an ocean, river, or lake. In a further embodiment, the microbes can be from the surface of the body of water, or any depth of the body of water (e.g., a deep sea sample).

[0286] The microorganisms of the disclosure may be isolated in substantially pure or mixed cultures. They may be concentrated, diluted, or provided in the natural concentrations in which they are found in the source material. For example, microorganisms from saline sediments may be isolated for use in this disclosure by suspending the sediment in fresh water and allowing the sediment to fall to the bottom. The water containing the bulk of the microorganisms may be removed by decantation after a suitable period of settling and either administered to the GI tract of an ungulate, or concentrated by filtering or centrifugation, diluted to an appropriate concentration and administered to the GI tract of an ungulate with the bulk of the salt removed. By way of further example, microorganisms from mineralized or toxic sources may be similarly treated to recover the microbes for application to the ungulate to minimize the potential for damage to the animal.

[0287] In another embodiment, the microorganisms are used in a crude form, in which they are not isolated from the source material in which they naturally reside. For example, the microorganisms are provided in combination with the source material in which they reside; for example, fecal matter, cud, or other composition found in the gastrointestinal tract. In this embodiment, the source material may include one or more species of microorganisms.

[0288] In some embodiments, a mixed population of microorganisms is used in the methods of the disclosure.

[0289] In embodiments of the disclosure where the microorganisms are isolated from a source material (for example, the material in which they naturally reside), any one or a combination of a number of standard techniques which will be readily known to skilled persons may be used. However, by way of example, these in general employ processes by which a solid or liquid culture of a single microorganism can be obtained in a substantially pure form, usually by physical separation on the surface of a solid microbial growth medium or by volumetric dilutive isolation into a liquid microbial growth medium. These processes may include isolation from dry material, liquid suspension, slurries or homogenates in which the material is spread in a thin layer over an appropriate solid gel growth medium, or serial dilutions of the material made into a sterile medium and inoculated into liquid or solid culture media.

[0290] Whilst not essential, in one embodiment, the material containing the microorganisms may be pre-treated prior to the isolation process in order to either multiply all microorganisms in the material. Microorganisms can then be isolated from the enriched materials as disclosed above.

[0291] In certain embodiments, as mentioned herein before, the microorganism(s) may be used in crude form and need not be isolated from an animal or a media. For example, cud, feces, or growth media which includes the microorganisms identified to be of benefit to increased milk production in ungulates may be obtained and used as a crude source of microorganisms for the next round of the method or as a crude source of microorganisms at the conclusion of the method. For example, fresh feces could be obtained and optionally processed.

### Microbiome Shift and Abundance of Microbes

[0292] In some embodiments, the microbiome of a ruminant, including the rumen microbiome, comprises a diverse arrive of microbes with a wide variety of metabolic capabilities. The microbiome is influenced by a range of factors including diet, variations in animal metabolism, and breed, among others. Most bovine diets are plant-based and rich in complex polysaccharides that enrich the gastrointestinal microbial community for microbes capable of breaking down specific polymeric components in the diet. The end products of primary degradation sustains a chain of microbes that ultimately produce a range of organic acids together with hydrogen and carbon dioxide. Because of the complex and interlinked nature of the microbiome, changing the diet and thus substrates for primary degradation may have a cascading effect on rumen microbial metabolism, with changes in both the organic acid profiles and the methane levels produced, thus impacting the quality and quantity of animal production and or the products produced by the animal. See Menezes et al. (2011. FEMS Microbiol. Ecol. 78(2):256-265.)

[0293] In some aspects, the present disclosure is drawn to administering microbial compositions described herein to modulate or shift the microbiome of a ruminant.

[0294] In some embodiments, the microbiome is shifted through the administration of one or more microbes to the gastrointestinal tract. In further embodiments, the one or more microbes are those selected from Table 1 or Table 3. In some embodiments, the microbiome shift or modulation includes a decrease or loss of specific microbes that were present prior to the administration of one or more microbes of the present disclosure. In some embodiments, the microbiome shift or modulation includes an increase in microbes that were present prior to the administration of one or more microbes of the present disclosure. In some embodiments, the microbiome shift or modulation includes a gain of one or more microbes that were not present prior to the administration of one or more microbes of the present disclosure. In a further embodiment, the gain of one or more microbes is a microbe that was not specifically included in the administered microbial consortium.

[0295] In some embodiments, the administration of microbes of the present disclosure results in a sustained modulation of the microbiome such that the administered microbes are present in the microbiome for a period of at least 1 to 10, 1 to 9, 1 to 8, 1 to 7, 1 to 6, 1 to 5, 1 to 4, 1 to 3, 1 to 2, 2 to 10, 2 to 9, 2 to 8, 2 to 7, 2 to 6, 2 to 5, 2 to 4, 2 to 3, 3 to 10, 3 to 9, 3 to 8, 3 to 7, 3 to 6, 3 to 5, 3 to 4, 4 to 10, 4 to 9, 4 to 8, 4 to 7, 4 to 6, 4 to 5, 5 to 10, 5 to 9, 5 to 8, 5 to 7, 5 to 6, 6 to 10, 6 to 9, 6 to 8, 6 to 7, 7 to 10, 7 to 9, 7 to 8, 8 to 10, 8 to 9, 9 to 10, 1, 2, 3, 4, 5, 6, 7, 8, 9, or 10 days.

[0296] In some embodiments, the administration of microbes of the present disclosure results in a sustained modulation of the microbiome such that the administered microbes are present in the microbiome for a period of at least 1 to 10, 1 to 9, 1 to 8, 1 to 7, 1 to 6, 1 to 5, 1 to 4, 1 to 3, 1 to 2, 2 to 10, 2 to 9, 2 to 8, 2 to 7, 2 to 6, 2 to 5, 2 to 4, 2 to 3, 3 to 10, 3 to 9, 3 to 8, 3 to 7, 3 to 6, 3 to 5, 3 to 4, 4 to 10, 4 to 9, 4 to 8, 4 to 7, 4 to 6, 4 to 5, 5 to 10, 5 to 9, 5 to 8, 5 to 7, 5 to 6, 6 to 10, 6 to 9, 6 to 8, 6 to 7, 7 to 10, 7 to 9, 7 to 8, 8 to 10, 8 to 9, 9 to 10, 1, 2, 3, 4, 5, 6, 7, 8, 9, or 10 weeks.

[0297] In some embodiments, the administration of microbes of the present disclosure results in a sustained modulation of the microbiome such that the administered microbes are present in the microbiome for a period of at least 1 to 10, 1 to 9, 1 to 8, 1 to 7, 1 to 6, 1 to 5, 1 to 4, 1 to 3, 1 to 2, 2 to 10, 2 to 9, 2 to 8, 2 to 7, 2 to 6, 2 to 5, 2 to 4, 2 to 3, 3 to 10, 3 to 9, 3 to 8, 3 to 7, 3 to 6, 3 to 5, 3 to 4, 4 to 10, 4 to 9, 4 to 8, 4 to 7, 4 to 6, 4 to 5, 5 to 10, 5 to 9, 5 to 8, 5 to 7, 5 to 6, 6 to 10, 6 to 9, 6 to 8, 6 to 7, 7 to 10, 7 to 9, 7 to 8, 8 to 10, 8 to 9, 9 to 10, 1, 2, 3, 4, 5, 6, 7, 8, 9, 10, 11, or 12 months.

[0298] In some embodiments, the presence of the administered microbes are detected by sampling the gastrointestinal tract and using primers to amplify the 16S or 18S rDNA sequences, or the ITS rDNA sequences of the administered microbes. In some embodiments, the administered microbes are one or more of those selected from Table 1 or Table 3, and the corresponding rDNA sequences are those selected from SEQ ID NOs:1-60, SEQ ID NOs: 2045-2108 and the SEQ ID NOs identified in Table 3.

[0299] In some embodiments, the microbiome of a ruminant is measured by amplifying polynucleotides collected from gastrointestinal samples, wherein the polynucleotides may be 16S or 18S rDNA fragments, or ITS rDNA fragments of microbial rDNA. In one embodiment, the microbiome is fingerprinted by a method of denaturing gradient gel electrophoresis (DGGE) wherein the amplified rDNA fragments are sorted by where they denature, and form a unique banding pattern in a gel that may be used for comparing the microbiome of the same ruminant over time or the microbiomes of multiple ruminants. In another embodiment, the microbiome is fingerprinted by a method of terminal restriction fragment length polymorphism (T-RFLP), wherein labelled PCR fragments are digested using a restriction enzyme and then sorted by size. In a further embodiment, the data collected from the T-RFLP method is evaluated by nonmetric multidimensional scaling (nMDS) ordination and PERMANOVA statistics identify differences in microbiomes, thus allowing for the identification and measurement of shifts in the microbiome. See also Shanks et al. (2011. Appl. Environ. Microbiol. 77(9):2992-3001), Petri et al. (2013. PLOS one. 8(12):e83424), and Menezes et al. (2011. FEMS Microbiol. Ecol. 78(2):256-265.)

[0300] In some embodiments, the administration of microbes of the present disclosure results in a modulation or shift of the microbiome which further results in a desired phenotype or improved trait.

[0301] According to the methods provided herein, a sample is processed to detect the presence of one or more microorganism types in the sample (FIG. 1, 1001; FIG. 2, 2001). The absolute number of one or more microorganism organism type in the sample is determined (FIG. 1, 1002; FIG. 2, 2002). The determination of the presence of the one or more organism types and the absolute number of at least one organism type can be conducted in parallel or serially. For example, in the case of a sample comprising a microbial community comprising bacteria (i.e., one microorganism type) and fungi (i.e., a second microorganism type), the user in one embodiment detects the presence of one or both of the organism types in the sample (FIG. 1, 1001; FIG. 2, 2001). The user, in a further embodiment, determines the absolute number of at least one organism type in the sample—in the case of this example, the number of bacteria, fungi or combination thereof, in the sample (FIG. 1, 1002; FIG. 2, 2002).

[0302] In one embodiment, the sample, or a portion thereof is subjected to flow cytometry (FC) analysis to detect the presence and/or number of one or more microorganism types (FIG. 1, 1001, 1002; FIG. 2, 2001, 2002). In one flow cytometer embodiment, individual microbial cells pass through an illumination zone, at a rate of at least about 300*s⁻¹, or at least about 500*s⁻¹, or at least about 1000*s⁻¹. However, one of ordinary skill in the art will recognize that this rate can vary depending on the type of instrument is employed. Detectors which are gated electronically measure the magnitude of a pulse representing the extent of light scattered. The magnitudes of these pulses are sorted electronically into “bins” or “channels,” permitting the display of histograms of the number of cells possessing a certain quantitative property (e.g., cell staining property, diameter, cell membrane) versus the channel number. Such analysis allows for the determination of the number of cells in each “bin” which in embodiments described herein is an “microorganism type” bin, e.g., a bacteria, fungi, nematode, protozoan, archaea, algae, dinoflagellate, virus, viroid, etc.

[0303] In one embodiment, a sample is stained with one or more fluorescent dyes wherein a fluorescent dye is specific to a particular microorganism type, to enable detection via a flow cytometer or some other detection and quantification method that harnesses fluorescence, such as fluorescence microscopy. The method can provide quantification of the number of cells and/or cell volume of a given organism type in a sample. In a further embodiment, as described herein, flow cytometry is harnessed to determine the presence and quantity of a unique first marker and/or unique second marker of the organism type, such as enzyme expression, cell surface protein expression, etc. Two- or three-variable histograms or contour plots of, for example, light scattering versus fluorescence from a cell membrane stain (versus fluorescence from a protein stain or DNA stain) may also be generated, and thus an impression may be gained of the distribution of a variety of properties of interest among the cells in the population as a whole. A number of displays of such multiparameter flow cytometric data are in common use and are amenable for use with the methods described herein.

[0304] In one embodiment of processing the sample to detect the presence and number of one or more microorganism types, a microscopy assay is employed (FIG. 1, 1001, 1002). In one embodiment, the microscopy is optical microscopy, where visible light and a system of lenses are used to magnify images of small samples. Digital images can be captured by a charge-couple device (CCD) camera. Other microscopic techniques include, but are not limited to, scanning electron microscopy and transmission electron microscopy. Microorganism types are visualized and quantified according to the aspects provided herein.

[0305] In another embodiment of in order to detect the presence and number of one or more microorganism types, the sample, or a portion thereof is subjected to fluorescence microscopy. Different fluorescent dyes can be used to directly stain cells in samples and to quantify total cell counts using an epifluorescence microscope as well as flow cytometry, described above. Useful dyes to quantify microorganisms include but are not limited to acridine orange (AO), 4,6-di-amino-2 phenylindole (DAPI) and 5-cyano-2,3 Dytolyl Tetrazolium Chloride (CTC). Viable cells can be estimated by a viability staining method such as the LIVE/DEAD® Bacterial Viability Kit (Bac-Light™) which contains two nucleic acid stains: the green-fluorescent SYTO 9™ dye penetrates all membranes and the red-fluorescent propidium iodide (PI) dye penetrates cells with damaged membranes. Therefore, cells with compromised membranes will stain red, whereas cells with undamaged membranes will stain green. Fluorescent in situ hybridization (FISH) extends epifluorescence microscopy, allowing for the fast detection and enumeration of specific organisms. FISH uses fluorescent labelled oligonucleotides probes (usually 15-25 basepairs) which bind specifically to organism DNA in the sample, allowing the visualization of the cells using an epifluorescence or confocal laser scanning microscope (CLSM). Catalyzed reporter deposition fluorescence in situ hybridization (CARD-FISH) improves upon the FISH method by using oligonucleotide probes labelled with a horse radish peroxidase (HRP) to amplify the intensity of the signal obtained from the microorganisms being studied. FISH can be combined with other techniques to characterize microorganism communities. One combined technique is high affinity peptide nucleic acid (PNA)-FISH, where the probe has an enhanced capability to penetrate through the Extracellular Polymeric Substance (EPS) matrix. Another example is LIVE/DEAD-FISH which combines the cell viability kit with FISH and has been used to assess the efficiency of disinfection in drinking water distribution systems.

[0306] In another embodiment, the sample, or a portion thereof is subjected to Raman micro-spectroscopy in order to determine the presence of a microorganism type and the absolute number of at least one microorganism type (FIG. 1, 1001-1002; FIG. 2, 2001-2002). Raman micro-spectroscopy is a non-destructive and label-free technology capable of detecting and measuring a single cell Raman spectrum (SCRS). A typical SCRS provides an intrinsic biochemical “fingerprint” of a single cell. A SCRS contains rich information of the biomolecules within it, including nucleic acids, proteins, carbohydrates and lipids, which enables characterization of different cell species, physiological changes and cell phenotypes. Raman microscopy examines the scattering of laser light by the chemical bonds of different cell biomarkers. A SCRS is a sum of the spectra of all the biomolecules in one single cell, indicating a cell's phenotypic profile. Cellular phenotypes, as a consequence of gene expression, usually reflect genotypes. Thus, under identical growth conditions, different microorganism types give distinct SCRS corresponding to differences in their genotypes and can thus be identified by their Raman spectra.

[0307] In yet another embodiment, the sample, or a portion thereof is subjected to centrifugation in order to determine the presence of a microorganism type and the number of at least one microorganism type (FIG. 1, 1001-1002; FIG. 2, 2001-2002). This process sediments a heterogeneous mixture by using the centrifugal force created by a centrifuge. More dense components of the mixture migrate away from the axis of the centrifuge, while less dense components of the mixture migrate towards the axis. Centrifugation can allow fractionation of samples into cytoplasmic, membrane and extracellular portions. It can also be used to determine localization information for biological molecules of interest. Additionally, centrifugation can be used to fractionate total microbial community DNA. Different prokaryotic groups differ in their guanine-plus-cytosine (G+C) content of DNA, so density-gradient centrifugation based on G+C content is a method to differentiate organism types and the number of cells associated with each type. The technique generates a fractionated profile of the entire community DNA and indicates abundance of DNA as a function of G+C content. The total community DNA is physically separated into highly purified fractions, each representing a different G+C content that can be analyzed by additional molecular techniques such as denaturing gradient gel electrophoresis (DGGE)/amplified ribosomal DNA restriction analysis (ARDRA) (see discussion herein) to assess total microbial community diversity and the presence/quantity of one or more microorganism types.

[0308] In another embodiment, the sample, or a portion thereof is subjected to staining in order to determine the presence of a microorganism type and the number of at least one microorganism type (FIG. 1, 1001-1002; FIG. 2, 2001-2002). Stains and dyes can be used to visualize biological tissues, cells or organelles within cells. Staining can be used in conjunction with microscopy, flow cytometry or gel electrophoresis to visualize or mark cells or biological molecules that are unique to different microorganism types. In vivo staining is the process of dyeing living tissues, whereas in vitro staining involves dyeing cells or structures that have been removed from their biological context. Examples of specific staining techniques for use with the methods described herein include, but are not limited to: gram staining to determine gram status of bacteria, endospore staining to identify the presence of endospores, Ziehl-Neelsen staining, haematoxylin and eosin staining to examine thin sections of tissue, papanicolaou staining to examine cell samples from various bodily secretions, periodic acid-Schiff staining of carbohydrates, Masson's trichome employing a three-color staining protocol to distinguish cells from the surrounding connective tissue, Romanowsky stains (or common variants that include Wright's stain, Jenner's stain, May-Grunwald stain, Leishman stain and Giemsa stain) to examine blood or bone marrow samples, silver staining to reveal proteins and DNA, Sudan staining for lipids and Conklin's staining to detect true endospores. Common biological stains include acridine orange for cell cycle determination; bismarck brown for acid mucins; carmine for glycogen; carmine alum for nuclei; Coomassie blue for proteins; Cresyl violet for the acidic components of the neuronal cytoplasm; Crystal violet for cell walls; DAPI for nuclei; eosin for cytoplasmic material, cell membranes, some extracellular structures and red blood cells; ethidium bromide for DNA; acid fuchsine for collagen, smooth muscle or mitochondria; haematoxylin for nuclei; Hoechst stains for DNA; iodine for starch; malachite green for bacteria in the Gimenez staining technique and for spores; methyl green for chromatin; methylene blue for animal cells; neutral red for Nissl substance; Nile blue for nuclei; Nile red for lipohilic entities; osmium tetroxide for lipids; rhodamine is used in fluorescence microscopy; safranin for nuclei. Stains are also used in transmission electron microscopy to enhance contrast and include phosphotungstic acid, osmium tetroxide, ruthenium tetroxide, ammonium molybdate, cadmium iodide, carbohydrazide, ferric chloride, hexamine, indium trichloride, lanthanum nitrate, lead acetate, lead citrate, lead(II) nitrate, periodic acid, phosphomolybdic acid, potassium ferricyanide, potassium ferrocyanide, ruthenium red, silver nitrate, silver proteinate, sodium chloroaurate, thallium nitrate, thiosemicarbazide, uranyl acetate, uranyl nitrate, and vanadyl sulfate.

[0309] In another embodiment, the sample, or a portion thereof is subjected to mass spectrometry (MS) in order to determine the presence of a microorganism type and the number of at least one microorganism type (FIG. 1, 1001-1002; FIG. 2, 2001-2002). MS, as discussed below, can also be used to detect the presence and expression of one or more unique markers in a sample (FIG. 1, 1003-1004; FIG. 2, 2003-2004). MS is used for example, to detect the presence and quantity of protein and/or peptide markers unique to microorganism types and therefore to provide an assessment of the number of the respective microorganism type in the sample. Quantification can be either with stable isotope labelling or label-free. De novo sequencing of peptides can also occur directly from MS/MS spectra or sequence tagging (produce a short tag that can be matched against a database). MS can also reveal post-translational modifications of proteins and identify metabolites. MS can be used in conjunction with chromatographic and other separation techniques (such as gas chromatography, liquid chromatography, capillary electrophoresis, ion mobility) to enhance mass resolution and determination.

[0310] In another embodiment, the sample, or a portion thereof is subjected to lipid analysis in order to determine the presence of a microorganism type and the number of at least one microorganism type (FIG. 1, 1001-1002; FIG. 2, 2001-2002). Fatty acids are present in a relatively constant proportion of the cell biomass, and signature fatty acids exist in microbial cells that can differentiate microorganism types within a community. In one embodiment, fatty acids are extracted by saponification followed by derivatization to give the respective fatty acid methyl esters (FAMEs), which are then analyzed by gas chromatography. The FAME profile in one embodiment is then compared to a reference FAME database to identify the fatty acids and their corresponding microbial signatures by multivariate statistical analyses.

[0311] In the aspects of the methods provided herein, the number of unique first makers in the sample, or portion thereof (e.g., sample aliquot) is measured, as well as the abundance of each of the unique first markers (FIG. 1, 1003; FIG. 2, 2003). A unique marker is a marker of a microorganism strain. It should be understood by one of ordinary skill in the art that depending on the unique marker being probed for and measured, the entire sample need not be analyzed. For example, if the unique marker is unique to bacterial strains, then the fungal portion of the sample need not be analyzed. As described above, in some embodiments, measuring the absolute abundance of one or more organism types in a sample comprises separating the sample by organism type, e.g., via flow cytometry.

[0312] Any marker that is unique to an organism strain can be employed herein. For example, markers can include, but are not limited to, small subunit ribosomal RNA genes (16S/18S rDNA), large subunit ribosomal RNA genes (23S/25S/28S rDNA), intercalary 5.8S gene, cytochrome c oxidase, beta-tubulin, elongation factor, RNA polymerase and internal transcribed spacer (ITS).

[0313] Ribosomal RNA genes (rDNA), especially the small subunit ribosomal RNA genes, i.e., 18S rRNA genes (18S rDNA) in the case of eukaryotes and 16S rRNA (16S rDNA) in the case of prokaryotes, have been the predominant target for the assessment of organism types and strains in a microbial community. However, the large subunit ribosomal RNA genes, 28S rDNAs, have been also targeted. rDNAs are suitable for taxonomic identification because: (i) they are ubiquitous in all known organisms; (ii) they possess both conserved and variable regions; (iii) there is an exponentially expanding database of their sequences available for comparison. In community analysis of samples, the conserved regions serve as annealing sites for the corresponding universal PCR and/or sequencing primers, whereas the variable regions can be used for phylogenetic differentiation. In addition, the high copy number of rDNA in the cells facilitates detection from environmental samples.

[0314] The internal transcribed spacer (ITS), located between the 18S rDNA and 28S rDNA, has also been targeted. The ITS is transcribed but spliced away before assembly of the ribosomes The ITS region is composed of two highly variable spacers, ITS1 and ITS2, and the intercalary 5.8S gene. This rDNA operon occurs in multiple copies in genomes. Because the ITS region does not code for ribosome components, it is highly variable.

[0315] In one embodiment, the unique RNA marker can be an mRNA marker, an siRNA marker or a ribosomal RNA marker.

[0316] Protein-coding functional genes can also be used herein as a unique first marker. Such markers include but are not limited to: the recombinase A gene family (bacterial RecA, archaea RadA and RadB, eukaryotic Rad51 and Rad57, phage UvsX); RNA polymerase p subunit (RpoB) gene, which is responsible for transcription initiation and elongation, chaperonins. Candidate marker genes have also been identified for bacteria plus archaea: ribosomal protein S2 (rpsB), ribosomal protein S10 (rpsJ), ribosomal protein L1 rplA), translation elongation factor EF-2, translation initiation factor IF-2, metalloendopeptidase, ribosomal protein L22, ffh signal recognition particle protein, ribosomal protein L4/Lle (rplD), ribosomal protein L2 (rplB), ribosomal protein S9 (rpsI), ribosomal protein L3 (rplC), phenylalanyl-tRNA synthetase beta subunit, ribosomal protein L14b/L23e (rplN), ribosomal protein S5, ribosomal protein S19 (rpsS), ribosomal protein S7, ribosomal protein L16/L10E (rplP), ribosomal protein S13 (rpsM), phenylalanyl-tRNA synthetase a subunit, ribosomal protein L15, ribosomal protein L25/L23, ribosomal protein L6 (rplF), ribosomal protein L11 (rplK), ribosomal protein L5 (rplE), ribosomal protein S12/S23, ribosomal protein L29, ribosomal protein S3 (rpsC), ribosomal protein S11 (rpsK), ribosomal protein L10, ribosomal protein S8, tRNA pseudouridine synthase B, ribosomal protein L18P/L5E, ribosomal protein S15P/S13e, Porphobilinogen deaminase, ribosomal protein S17, ribosomal protein L13 (rplM), phosphoribosylformylglycinamidine cyclo-ligase (rpsE), ribonuclease HII and ribosomal protein L24. Other candidate marker genes for bacteria include: transcription elongation protein NusA (nusA), rpoB DNA-directed RNA polymerase subunit beta (rpoB), GTP-binding protein EngA, rpoC DNA-directed RNA polymerase subunit beta′, priA primosome assembly protein, transcription-repair coupling factor, CTP synthase (pyrG), secY preprotein translocase subunit SecY, GTP-binding protein Obg/CgtA, DNA polymerase 1, rpsF 30S ribosomal protein S6, poA DNA-directed RNA polymerase subunit alpha, peptide chain release factor 1, rplI 50S ribosomal protein L9, polyribonucleotide nucleotidyltransferase, tsf elongation factor Ts (tsf), rplQ 50S ribosomal protein L17, tRNA (guanine-N(1)-)-methyltransferase (rplS), rplY probable 50S ribosomal protein L25, DNA repair protein RadA, glucose-inhibited division protein A, ribosome-binding factor A, DNA mismatch repair protein MutL, smpB SsrA-binding protein (smpB), N-acetylglucosaminyl transferase, S-adenosyl-methyltransferase MraW, UDP-N-acetylmuramoylalanine-D-glutamate ligase, rplS 50S ribosomal protein L19, rplT 50S ribosomal protein L20 (rplT), ruvA Holliday junction DNA helicase, ruvB Holliday junction DNA helicase B, serS seryl-tRNA synthetase, rplU 50S ribosomal protein L21, rpsR 30S ribosomal protein S18, DNA mismatch repair protein MutS, rpsT 30S ribosomal protein S20, DNA repair protein RecN, frr ribosome recycling factor (frr), recombination protein RecR, protein of unknown function UPF0054, miaA tRNA isopentenyltransferase, GTP-binding protein YchF, chromosomal replication initiator protein DnaA, dephospho-CoA kinase, 16S rRNA processing protein RimM, ATP-cone domain protein, 1-deoxy-D-xylulose 5-phosphate reductoisomerase, 2C-methyl-D-erythritol 2,4-cyclodiphosphate synthase, fatty acid/phospholipid synthesis protein PlsX, tRNA(Ile)-lysidine synthetase, dnaG DNA primase (dnaG), ruvC Holliday junction resolvase, rpsP 30S ribosomal protein S16, Recombinase A recA, riboflavin biosynthesis protein RibF, glycyl-tRNA synthetase beta subunit, trmU tRNA (5-methylaminomethyl-2-thiouridylate)-methyltransferase, rpmI 50S ribosomal protein L35, hemE uroporphyrinogen decarboxylase, Rod shape-determining protein, rpmA 50S ribosomal protein L27 (rpmA), peptidyl-tRNA hydrolase, translation initiation factor IF-3 (infC), UDP-N-acetylmuramyl-tripeptide synthetase, rpmF 50S ribosomal protein L32, rplL 50S ribosomal protein L7/L12 (rpIL), leuS leucyl-tRNA synthetase, ligA NAD-dependent DNA ligase, cell division protein FtsA, GTP-binding protein TypA, ATP-dependent Clp protease, ATP-binding subunit CIpX, DNA replication and repair protein RecF and UDP-N-acetylenolpyruvoylglucosamine reductase.

[0317] Phospholipid fatty acids (PLFAs) may also be used as unique first markers according to the methods described herein. Because PLFAs are rapidly synthesized during microbial growth, are not found in storage molecules and degrade rapidly during cell death, it provides an accurate census of the current living community. All cells contain fatty acids (FAs) that can be extracted and esterified to form fatty acid methyl esters (FAMEs). When the FAMEs are analyzed using gas chromatography-mass spectrometry, the resulting profile constitutes a ‘fingerprint’ of the microorganisms in the sample. The chemical compositions of membranes for organisms in the domains Bacteria and Eukarya are comprised of fatty acids linked to the glycerol by an ester-type bond (phospholipid fatty acids (PLFAs)). In contrast, the membrane lipids of Archaea are composed of long and branched hydrocarbons that are joined to glycerol by an ether-type bond (phospholipid ether lipids (PLELs)). This is one of the most widely used non-genetic criteria to distinguish the three domains. In this context, the phospholipids derived from microbial cell membranes, characterized by different acyl chains, are excellent signature molecules, because such lipid structural diversity can be linked to specific microbial taxa.

[0318] As provided herein, in order to determine whether an organism strain is active, the level of expression of one or more unique second markers, which can be the same or different as the first marker, is measured (FIG. 1, 1004; FIG. 2, 2004). Unique first unique markers are described above. The unique second marker is a marker of microorganism activity. For example, in one embodiment, the mRNA or protein expression of any of the first markers described above is considered a unique second marker for the purposes of this invention.

[0319] In one embodiment, if the level of expression of the second marker is above a threshold level (e.g., a control level) or at a threshold level, the microorganism is considered to be active (FIG. 1, 1005; FIG. 2, 2005). Activity is determined in one embodiment, if the level of expression of the second marker is altered by at least about 5%, at least about 10%, at least about 15%, at least about 20%, at least about 25%, or at least about 30%, as compared to a threshold level, which in some embodiments, is a control level.

[0320] Second unique markers are measured, in one embodiment, at the protein, RNA or metabolite level. A unique second marker is the same or different as the first unique marker.

[0321] As provided above, a number of unique first markers and unique second markers can be detected according to the methods described herein. Moreover, the detection and quantification of a unique first marker is carried out according to methods known to those of ordinary skill in the art (FIG. 1, 1003-1004, FIG. 2, 2003-2004).

[0322] Nucleic acid sequencing (e.g., gDNA, cDNA, rRNA, mRNA) in one embodiment is used to determine absolute abundance of a unique first marker and/or unique second marker. Sequencing platforms include, but are not limited to, Sanger sequencing and high-throughput sequencing methods available from Roche/454 Life Sciences, Illumina/Solexa, Pacific Biosciences, Ion Torrent and Nanopore. The sequencing can be amplicon sequencing of particular DNA or RNA sequences or whole metagenome/transcriptome shotgun sequencing.

[0323] Traditional Sanger sequencing (Sanger et al. (1977) DNA sequencing with chain-terminating inhibitors. Proc Natl. Acad. Sci. USA, 74, pp. 5463-5467, incorporated by reference herein in its entirety) relies on the selective incorporation of chain-terminating dideoxynucleotides by DNA polymerase during in vitro DNA replication and is amenable for use with the methods described herein.

[0324] In another embodiment, the sample, or a portion thereof is subjected to extraction of nucleic acids, amplification of DNA of interest (such as the rRNA gene) with suitable primers and the construction of clone libraries using sequencing vectors. Selected clones are then sequenced by Sanger sequencing and the nucleotide sequence of the DNA of interest is retrieved, allowing calculation of the number of unique microorganism strains in a sample.

[0325] 454 pyrosequencing from Roche/454 Life Sciences yields long reads and can be harnessed in the methods described herein (Margulies et al. (2005) Nature, 437, pp. 376-380; U.S. Pat. Nos. 6,274,320; 6,258,568; 6,210,891, each of which is herein incorporated in its entirety for all purposes). Nucleic acid to be sequenced (e.g., amplicons or nebulized genomic/metagenomic DNA) have specific adapters affixed on either end by PCR or by ligation. The DNA with adapters is fixed to tiny beads (ideally, one bead will have one DNA fragment) that are suspended in a water-in-oil emulsion. An emulsion PCR step is then performed to make multiple copies of each DNA fragment, resulting in a set of beads in which each bead contains many cloned copies of the same DNA fragment. Each bead is then placed into a well of a fiber-optic chip that also contains enzymes necessary for the sequencing-by-synthesis reactions. The addition of bases (such as A, C, G, or T) trigger pyrophosphate release, which produces flashes of light that are recorded to infer the sequence of the DNA fragments in each well. About 1 million reads per run with reads up to 1,000 bases in length can be achieved. Paired-end sequencing can be done, which produces pairs of reads, each of which begins at one end of a given DNA fragment. A molecular barcode can be created and placed between the adapter sequence and the sequence of interest in multiplex reactions, allowing each sequence to be assigned to a sample bioinformatically.

[0326] Illumina/Solexa sequencing produces average read lengths of about 25 basepairs (bp) to about 300 bp (Bennett et al. (2005) Pharmacogenomics, 6:373-382; Lange et al. (2014). BMC Genomics 15, p. 63; Fadrosh et al. (2014) Microbiome 2, p. 6; Caporaso et al. (2012) ISME J, 6, p. 1621-1624; Bentley et al. (2008) Accurate whole human genome sequencing using reversible terminator chemistry. Nature, 456:53-59). This sequencing technology is also sequencing-by-synthesis but employs reversible dye terminators and a flow cell with a field of oligos attached. DNA fragments to be sequenced have specific adapters on either end and are washed over a flow cell filled with specific oligonucleotides that hybridize to the ends of the fragments. Each fragment is then replicated to make a cluster of identical fragments. Reversible dye-terminator nucleotides are then washed over the flow cell and given time to attach. The excess nucleotides are washed away, the flow cell is imaged, and the reversible terminators can be removed so that the process can repeat and nucleotides can continue to be added in subsequent cycles. Paired-end reads that are 300 bases in length each can be achieved. An Illumina platform can produce 4 billion fragments in a paired-end fashion with 125 bases for each read in a single run. Barcodes can also be used for sample multiplexing, but indexing primers are used.

[0327] The SOLiD (Sequencing by Oligonucleotide Ligation and Detection, Life Technologies) process is a “sequencing-by-ligation” approach, and can be used with the methods described herein for detecting the presence and abundance of a first marker and/or a second marker (FIG. 1, 1003-1004; FIG. 2, 2003-2004) (Peckham et al. SOLID™ Sequencing and 2-Base Encoding. San Diego, Calif.: American Society of Human Genetics, 2007; Mitra et al. (2013) Analysis of the intestinal microbiota using SOLiD 16S rRNA gene sequencing and SOLiD shotgun sequencing. BMC Genomics, 14(Suppl 5): S16; Mardis (2008) Next-generation DNA sequencing methods. Annu Rev Genomics Hum Genet, 9:387-402; each incorporated by reference herein in its entirety). A library of DNA fragments is prepared from the sample to be sequenced, and are used to prepare clonal bead populations, where only one species of fragment will be present on the surface of each magnetic bead. The fragments attached to the magnetic beads will have a universal P1 adapter sequence so that the starting sequence of every fragment is both known and identical. Primers hybridize to the P1 adapter sequence within the library template. A set of four fluorescently labelled di-base probes compete for ligation to the sequencing primer. Specificity of the di-base probe is achieved by interrogating every 1st and 2nd base in each ligation reaction. Multiple cycles of ligation, detection and cleavage are performed with the number of cycles determining the eventual read length. The SOLiD platform can produce up to 3 billion reads per run with reads that are 75 bases long. Paired-end sequencing is available and can be used herein, but with the second read in the pair being only 35 bases long. Multiplexing of samples is possible through a system akin to the one used by Illumina, with a separate indexing run.

[0328] The Ion Torrent system, like 454 sequencing, is amenable for use with the methods described herein for detecting the presence and abundance of a first marker and/or a second marker (FIG. 1, 1003-1004; FIG. 2, 2003-2004). It uses a plate of microwells containing beads to which DNA fragments are attached. It differs from all of the other systems, however, in the manner in which base incorporation is detected. When a base is added to a growing DNA strand, a proton is released, which slightly alters the surrounding pH. Microdetectors sensitive to pH are associated with the wells on the plate, and they record when these changes occur. The different bases (A, C, G, T) are washed sequentially through the wells, allowing the sequence from each well to be inferred. The Ion Proton platform can produce up to 50 million reads per run that have read lengths of 200 bases. The Personal Genome Machine platform has longer reads at 400 bases. Bidirectional sequencing is available. Multiplexing is possible through the standard in-line molecular barcode sequencing.

[0329] Pacific Biosciences (PacBio) SMRT sequencing uses a single-molecule, real-time sequencing approach and in one embodiment, is used with the methods described herein for detecting the presence and abundance of a first marker and/or a second marker (FIG. 1, 1003-1004; FIG. 2, 2003-2004). The PacBio sequencing system involves no amplification step, setting it apart from the other major next-generation sequencing systems. In one embodiment, the sequencing is performed on a chip containing many zero-mode waveguide (ZMW) detectors. DNA polymerases are attached to the ZMW detectors and phospholinked dye-labeled nucleotide incorporation is imaged in real time as DNA strands are synthesized. The PacBio system yields very long read lengths (averaging around 4,600 bases) and a very high number of reads per run (about 47,000). The typical “paired-end” approach is not used with PacBio, since reads are typically long enough that fragments, through CCS, can be covered multiple times without having to sequence from each end independently. Multiplexing with PacBio does not involve an independent read, but rather follows the standard “in-line” barcoding model.

[0330] In one embodiment, where the first unique marker is the ITS genomic region, automated ribosomal intergenic spacer analysis (ARISA) is used in one embodiment to determine the number and identity of microorganism strains in a sample (FIG. 1, 1003, FIG. 2, 2003) (Ranjard et al. (2003). Environmental Microbiology 5, pp. 1111-1120, incorporated by reference in its entirety for all purposes). The ITS region has significant heterogeneity in both length and nucleotide sequence. The use of a fluorescence-labeled forward primer and an automatic DNA sequencer permits high resolution of separation and high throughput. The inclusion of an internal standard in each sample provides accuracy in sizing general fragments.

[0331] In another embodiment, fragment length polymorphism (RFLP) of PCR-amplified rDNA fragments, otherwise known as amplified ribosomal DNA restriction analysis (ARDRA), is used to characterize unique first markers and the abundance of the same in samples (FIG. 1, 1003, FIG. 2, 2003) (Massol-Deya et al. (1995). Mol. Microb. Ecol. Manual. 3.3.2, pp. 1-18, incorporated by reference in its entirety for all purposes). rDNA fragments are generated by PCR using general primers, digested with restriction enzymes, electrophoresed in agarose or acrylamide gels, and stained with ethidium bromide or silver nitrate.

[0332] One fingerprinting technique used in detecting the presence and abundance of a unique first marker is single-stranded-conformation polymorphism (SSCP) (Lee et al. (1996). Appl Environ Microbiol 62, pp. 3112-3120; Scheinert et al. (1996). J. Microbiol. Methods 26, pp. 103-117; Schwieger and Tebbe (1998). Appl. Environ. Microbiol. 64, pp. 4870-4876, each of which is incorporated by reference herein in its entirety). In this technique, DNA fragments such as PCR products obtained with primers specific for the 16S rRNA gene, are denatured and directly electrophoresed on a non-denaturing gel. Separation is based on differences in size and in the folded conformation of single-stranded DNA, which influences the electrophoretic mobility. Reannealing of DNA strands during electrophoresis can be prevented by a number of strategies, including the use of one phosphorylated primer in the PCR followed by specific digestion of the phosphorylated strands with lambda exonuclease and the use of one biotinylated primer to perform magnetic separation of one single strand after denaturation. To assess the identity of the predominant populations in a given consortium, in one embodiment, bands are excised and sequenced, or SSCP-patterns can be hybridized with specific probes. Electrophoretic conditions, such as gel matrix, temperature, and addition of glycerol to the gel, can influence the separation.

[0333] In addition to sequencing based methods, other methods for quantifying expression (e.g., gene, protein expression) of a second marker are amenable for use with the methods provided herein for determining the level of expression of one or more second markers (FIG. 1, 1004; FIG. 2, 2004). For example, quantitative RT-PCR, microarray analysis, linear amplification techniques such as nucleic acid sequence based amplification (NASBA) are all amenable for use with the methods described herein, and can be carried out according to methods known to those of ordinary skill in the art.

[0334] In another embodiment, the sample, or a portion thereof is subjected to a quantitative polymerase chain reaction (PCR) for detecting the presence and abundance of a first marker and/or a second marker (FIG. 1, 1003-1004; FIG. 2, 2003-2004). Specific microorganism strains activity is measured by reverse transcription of transcribed ribosomal and/or messenger RNA (rRNA and mRNA) into complementary DNA (cDNA), followed by PCR (RT-PCR).

[0335] In another embodiment, the sample, or a portion thereof is subjected to PCR-based fingerprinting techniques to detect the presence and abundance of a first marker and/or a second marker (FIG. 1, 1003-1004; FIG. 2, 2003-2004). PCR products can be separated by electrophoresis based on the nucleotide composition. Sequence variation among the different DNA molecules influences the melting behaviour, and therefore molecules with different sequences will stop migrating at different positions in the gel. Thus electrophoretic profiles can be defined by the position and the relative intensity of different bands or peaks and can be translated to numerical data for calculation of diversity indices. Bands can also be excised from the gel and subsequently sequenced to reveal the phylogenetic affiliation of the community members. Electrophoresis methods include, but are not limited to: denaturing gradient gel electrophoresis (DGGE), temperature gradient gel electrophoresis (TGGE), single-stranded-conformation polymorphism (SSCP), restriction fragment length polymorphism analysis (RFLP) or amplified ribosomal DNA restriction analysis (ARDRA), terminal restriction fragment length polymorphism analysis (T-RFLP), automated ribosomal intergenic spacer analysis (ARISA), randomly amplified polymorphic DNA (RAPD), DNA amplification fingerprinting (DAF) and Bb-PEG electrophoresis.

[0336] In another embodiment, the sample, or a portion thereof is subjected to a chip-based platform such as microarray or microfluidics to determine the abundance of a unique first marker and/or presence/abundance of a unique second marker (FIG. 1, 1003-1004, FIG. 2,2003-2004). The PCR products are amplified from total DNA in the sample and directly hybridized to known molecular probes affixed to microarrays. After the fluorescently labeled PCR amplicons are hybridized to the probes, positive signals are scored by the use of confocal laser scanning microscopy. The microarray technique allows samples to be rapidly evaluated with replication, which is a significant advantage in microbial community analyses. In general, the hybridization signal intensity on microarrays is directly proportional to the abundance of the target organism. The universal high-density 16S microarray (PhyloChip) contains about 30,000 probes of 16SrRNA gene targeted to several cultured microbial species and “candidate divisions”. These probes target all 121 demarcated prokaryotic orders and allow simultaneous detection of 8,741 bacterial and archaeal taxa. Another microarray in use for profiling microbial communities is the Functional Gene Array (FGA). Unlike PhyloChips, FGAs are designed primarily to detect specific metabolic groups of bacteria. Thus, FGA not only reveal the community structure, but they also shed light on the in situ community metabolic potential. FGA contain probes from genes with known biological functions, so they are useful in linking microbial community composition to ecosystem functions. An FGA termed GeoChip contains >24,000 probes from all known metabolic genes involved in various biogeochemical, ecological, and environmental processes such as ammonia oxidation, methane oxidation, and nitrogen fixation.

[0337] A protein expression assay, in one embodiment, is used with the methods described herein for determining the level of expression of one or more second markers (FIG. 1, 1004; FIG. 2, 2004). For example, in one embodiment, mass spectrometry or an immunoassay such as an enzyme-linked immunosorbant assay (ELISA) is utilized to quantify the level of expression of one or more unique second markers, wherein the one or more unique second markers is a protein.

[0338] In one embodiment, the sample, or a portion thereof is subjected to Bromodeoxyuridine (BrdU) incorporation to determine the level of a second unique marker (FIG. 1, 1004; FIG. 2, 2004). BrdU, a synthetic nucleoside analog of thymidine, can be incorporated into newly synthesized DNA of replicating cells. Antibodies specific for BRdU can then be used for detection of the base analog. Thus BrdU incorporation identifies cells that are actively replicating their DNA, a measure of activity of a microorganism according to one embodiment of the methods described herein. BrdU incorporation can be used in combination with FISH to provide the identity and activity of targeted cells.

[0339] In one embodiment, the sample, or a portion thereof is subjected to microautoradiography (MAR) combined with FISH to determine the level of a second unique marker (FIG. 1, 1004; FIG. 2, 2004). MAR-FISH is based on the incorporation of radioactive substrate into cells, detection of the active cells using autoradiography and identification of the cells using FISH. The detection and identification of active cells at single-cell resolution is performed with a microscope. MAR-FISH provides information on total cells, probe targeted cells and the percentage of cells that incorporate a given radiolabelled substance. The method provides an assessment of the in situ function of targeted microorganisms and is an effective approach to study the in vivo physiology of microorganisms. A technique developed for quantification of cell-specific substrate uptake in combination with MAR-FISH is known as quantitative MAR (QMAR).

[0340] In one embodiment, the sample, or a portion thereof is subjected to stable isotope Raman spectroscopy combined with FISH (Raman-FISH) to determine the level of a second unique marker (FIG. 1, 1004; FIG. 2, 2004). This technique combines stable isotope probing, Raman spectroscopy and FISH to link metabolic processes with particular organisms. The proportion of stable isotope incorporation by cells affects the light scatter, resulting in measurable peak shifts for labelled cellular components, including protein and mRNA components. Raman spectroscopy can be used to identify whether a cell synthesizes compounds including, but not limited to: oil (such as alkanes), lipids (such as triacylglycerols (TAG)), specific proteins (such as heme proteins, metalloproteins), cytochrome (such as P450, cytochrome c), chlorophyll, chromophores (such as pigments for light harvesting carotenoids and rhodopsins), organic polymers (such as polyhydroxyalkanoates (PHA), polyhydroxybutyrate (PHB)), hopanoids, steroids, starch, sulfide, sulfate and secondary metabolites (such as vitamin B12).

[0341] In one embodiment, the sample, or a portion thereof is subjected to DNA/RNA stable isotope probing (SIP) to determine the level of a second unique marker (FIG. 1, 1004; FIG. 2, 2004). SIP enables determination of the microbial diversity associated with specific metabolic pathways and has been generally applied to study microorganisms involved in the utilization of carbon and nitrogen compounds. The substrate of interest is labelled with stable isotopes (such as ³C or ¹⁵N) and added to the sample. Only microorganisms able to metabolize the substrate will incorporate it into their cells. Subsequently, ¹³C-DNA and ¹⁵N-DNA can be isolated by density gradient centrifugation and used for metagenomic analysis. RNA-based SIP can be a responsive biomarker for use in SIP studies, since RNA itself is a reflection of cellular activity.

[0342] In one embodiment, the sample, or a portion thereof is subjected to isotope array to determine the level of a second unique marker (FIG. 1, 1004; FIG. 2, 2004). Isotope arrays allow for functional and phylogenetic screening of active microbial communities in a high-throughput fashion. The technique uses a combination of SIP for monitoring the substrate uptake profiles and microarray technology for determining the taxonomic identities of active microbial communities. Samples are incubated with a ¹⁴C-labeled substrate, which during the course of growth becomes incorporated into microbial biomass. The ¹⁴C-labeled rRNA is separated from unlabeled rRNA and then labeled with fluorochromes. Fluorescent labeled rRNA is hybridized to a phylogenetic microarray followed by scanning for radioactive and fluorescent signals. The technique thus allows simultaneous study of microbial community composition and specific substrate consumption by metabolically active microorganisms of complex microbial communities.

[0343] In one embodiment, the sample, or a portion thereof is subjected to a metabolomics assay to determine the level of a second unique marker (FIG. 1, 1004; FIG. 2, 2004). Metabolomics studies the metabolome which represents the collection of all metabolites, the end products of cellular processes, in a biological cell, tissue, organ or organism. This methodology can be used to monitor the presence of microorganisms and/or microbial mediated processes since it allows associating specific metabolite profiles with different microorganisms. Profiles of intracellular and extracellular metabolites associated with microbial activity can be obtained using techniques such as gas chromatography-mass spectrometry (GC-MS). The complex mixture of a metabolomic sample can be separated by such techniques as gas chromatography, high performance liquid chromatography and capillary electrophoresis. Detection of metabolites can be by mass spectrometry, nuclear magnetic resonance (NMR) spectroscopy, ion-mobility spectrometry, electrochemical detection (coupled to HPLC) and radiolabel (when combined with thin-layer chromatography).

[0344] According to the embodiments described herein, the presence and respective number of one or more active microorganism strains in a sample are determined (FIG. 1, 1006; FIG. 2, 2006). For example, strain identity information obtained from assaying the number and presence of first markers is analyzed to determine how many occurrences of a unique first marker are present, thereby representing a unique microorganism strain (e.g., by counting the number of sequence reads in a sequencing assay). This value can be represented in one embodiment as a percentage of total sequence reads of the first maker to give a percentage of unique microorganism strains of a particular microorganism type. In a further embodiment, this percentage is multiplied by the number of microorganism types (obtained at step 1002 or 2002, see FIG. 1 and FIG. 2) to give the absolute abundance of the one or more microorganism strains in a sample and a given volume.

[0345] The one or more microorganism strains are considered active, as described above, if the level of second unique marker expression at a threshold level, higher than a threshold value, e.g., higher than at least about 5%, at least about 10%, at least about 20% or at least about 30% over a control level.

[0346] In another aspect of the invention, a method for determining the absolute abundance of one or more microorganism strains is determined in a plurality of samples (FIG. 2, see in particular, 2007). For a microorganism strain to be classified as active, it need only be active in one of the samples. The samples can be taken over multiple time points from the same source, or can be from different environmental sources (e.g., different animals).

[0347] The absolute abundance values over samples are used in one embodiment to relate the one or more active microorganism strains, with an environmental parameter (FIG. 2, 2008). In one embodiment, the environmental parameter is the presence of a second active microorganism strain. Relating the one or more active microorganism strains to the environmental parameter, in one embodiment, is carried out by determining the co-occurrence of the strain and parameter by correlation or by network analysis.

[0348] In one embodiment, determining the co-occurrence of one or more active microorganism strains with an environmental parameter comprises a network and/or cluster analysis method to measure connectivity of strains or a strain with an environmental parameter within a network, wherein the network is a collection of two or more samples that share a common or similar environmental parameter. In another embodiment, the network and/or cluster analysis method may be applied to determining the co-occurrence of two or more active microorganism strains in a sample (FIG. 2, 2008). In another embodiment, the network analysis comprises nonparametric approaches including mutual information to establish connectivity between variables. In another embodiment, the network analysis comprises linkage analysis, modularity analysis, robustness measures, betweenness measures, connectivity measures, transitivity measures, centrality measures or a combination thereof (FIG. 2, 2009). In another embodiment, the cluster analysis method comprises building a connectivity model, subspace model, distribution model, density model, or a centroid model and/or using community detection algorithms such as the Louvain, Bron-Kerbosch, Girvan-Newman, Clauset-Newman-Moore, Pons-Latapy, and Wakita-Tsurumi algorithms (FIG. 2, 2010).

[0349] In one embodiment, the cluster analysis method is a heuristic method based on modularity optimization. In a further embodiment, the cluster analysis method is the Louvain method. &e, e.g., the method described by Blondel et al. (2008). Fast unfolding of communities in large networks. Journal of Statistical Mechanics: Theory and Experiment, Volume 2008, October 2008, incorporated by reference herein in its entirety for all purposes.

[0350] In another embodiment, the network analysis comprises predictive modeling of network through link mining and prediction, collective classification, link-based clustering, relational similarity, or a combination thereof. In another embodiment, the network analysis comprises differential equation based modeling of populations. In another embodiment, the network analysis comprises Lotka-Volterra modeling.

[0351] In one embodiment, relating the one or more active microorganism strains to an environmental parameter (e.g., determining the co-occurrence) in the sample comprises creating matrices populated with linkages denoting environmental parameter and microorganism strain associations.

[0352] In one embodiment, the multiple sample data obtained at step 2007 (e.g., over two or more samples which can be collected at two or more time points where each time point corresponds to an individual sample), is compiled. In a further embodiment, the number of cells of each of the one or more microorganism strains in each sample is stored in an association matrix (which can be in some embodiments, an abundance matrix). In one embodiment, the association matrix is used to identify associations between active microorganism strains in a specific time point sample using rule mining approaches weighted with association (e.g., abundance) data. Filters are applied in one embodiment to remove insignificant rules.

[0353] In one embodiment, the absolute abundance of one or more, or two or more active microorganism strains is related to one or more environmental parameters (FIG. 2, 2008), e.g., via co-occurrence determination. Environmental parameters are chosen by the user depending on the sample(s) to be analyzed and are not restricted by the methods described herein. The environmental parameter can be a parameter of the sample itself, e.g., pH, temperature, amount of protein in the sample. Alternatively, the environmental parameter is a parameter that affects a change in the identity of a microbial community (i.e., where the “identity” of a microbial community is characterized by the type of microorganism strains and/or number of particular microorganism strains in a community), or is affected by a change in the identity of a microbial community. For example, an environmental parameter in one embodiment, is the food intake of an animal or the amount of milk (or the protein or fat content of the milk) produced by a lactating ruminant In one embodiment, the environmental parameter is the presence, activity and/or abundance of a second microorganism strain in the microbial community, present in the same sample.

[0354] In some embodiments described herein, an environmental parameter is referred to as a metadata parameter.

[0355] Other examples of metadata parameters include but are not limited to genetic information from the host from which the sample was obtained (e.g., DNA mutation information), sample pH, sample temperature, expression of a particular protein or mRNA, nutrient conditions (e.g., level and/or identity of one or more nutrients) of the surrounding environment/ecosystem), susceptibility or resistance to disease, onset or progression of disease, susceptibility or resistance of the sample to toxins, efficacy of xenobiotic compounds (pharmaceutical drugs), biosynthesis of natural products, or a combination thereof.

[0356] For example, according to one embodiment, microorganism strain number changes are calculated over multiple samples according to the method of FIG. 2 (i.e., at 2001-2007). Strain number changes of one or more active strains over time is compiled (e.g., one or more strains that have initially been identified as active according to step 2006), and the directionality of change is noted (i.e., negative values denoting decreases, positive values denoting increases). The number of cells over time is represented as a network, with microorganism strains representing nodes and the abundance weighted rules representing edges. Markov chains and random walks are leveraged to determine connectivity between nodes and to define clusters. Clusters in one embodiment are filtered using metadata in order to identify clusters associated with desirable metadata (FIG. 2, 2008).

[0357] In a further embodiment, microorganism strains are ranked according to importance by integrating cell number changes over time and strains present in target clusters, with the highest changes in cell number ranking the highest.

[0358] Network and/or cluster analysis method in one embodiment, is used to measure connectivity of the one or more strains within a network, wherein the network is a collection of two or more samples that share a common or similar environmental parameter. In one embodiment, network analysis comprises linkage analysis, modularity analysis, robustness measures, betweenness measures, connectivity measures, transitivity measures, centrality measures or a combination thereof. In another embodiment, network analysis comprises predictive modeling of network through link mining and prediction, social network theory, collective classification, link-based clustering, relational similarity, or a combination thereof. In another embodiment, network analysis comprises differential equation based modeling of populations. In yet another embodiment, network analysis comprises Lotka-Volterra modeling.

[0359] Cluster analysis method comprises building a connectivity model, subspace model, distribution model, density model, or a centroid model.

[0360] Network and cluster based analysis, for example, to carry out method step 2008 of FIG. 2, can be carried out via a module. As used herein, a module can be, for example, any assembly, instructions and/or set of operatively-coupled electrical components, and can include, for example, a memory, a processor, electrical traces, optical connectors, software (executing in hardware) and/or the like.

### Bovine Pathogen Resistance and Clearance

[0361] In some aspects, the present disclosure is drawn to administering one or more microbial compositions described herein to cows to clear the gastrointestinal tract of pathogenic microbes. In some embodiments, the present disclosure is further drawn to administering microbial compositions described herein to prevent colonization of pathogenic microbes in the gastrointestinal tract. In some embodiments, the administration of microbial compositions described herein further clears pathogens from the integument and the respiratory tract of cows, and/or prevent colonization of pathogens on the integument and in the respiratory tract. In some embodiments, the administration of microbial compositions described herein reduce leaky gut/intestinal permeability, inflammation, and/or incidence of liver disease.

[0362] In some embodiments, the microbial compositions of the present disclosure comprise one or more microbes that are present in the gastrointestinal tract of cows at a relative abundance of less than 15%, 14%, 13%, 12%, 11%, 10%, 9%, 8%, 7%, 6%, 5%, 4%, 3%, 2%, 1%, 0.5%, 0.1%, or 0.01%.

[0363] In some embodiments, after administration of microbial compositions of the present disclosure the one or more microbes are present in the gastrointestinal tract of the cow at a relative abundance of at least 0.5%, 1%, 5%, 10)%, 15%, 20%, 25%, 30%, 35%, 40%, 45%, 50%, 55%, 60%, 65%, 70%, 75%, 80%, 85%, 90%, or 95%.

[0364] Pathogenic microbes of cows may include the following: Clostridium perfringens, Clostridium botulinum, Salmonella typi, Salmonella typhimurium, Salmonella enterica, Salmonella pullorum, Erysipelothrix insidiosa, Campylobacter jejuni, Campylobacter coli, Campylobacter lari, Listeria monocytogenes, Streptococcus agalactiae, Streptococcus dysgalactiae, Corynebacterium bovis, Mycoplasma sp., Citrobacter sp., Enterobacter sp., Pseudomonas aeruginosa, Pasteurella sp., Bacillus cereus, Bacillus licheniformis, Streptococcus uberis, Staphylococcus aureus, and pathogenic strains of Escherichia coli and Staphylococcus aureus. In some embodiments, the pathogenic microbes include viral pathogens. In some embodiments, the pathogenic microbes are pathogenic to both cows and humans. In some embodiments, the pathogenic microbes are pathogenic to either cows or humans.

[0365] In some embodiments, the administration of compositions of the present disclosure to cows modulate the makeup of the gastrointestinal microbiome such that the administered microbes outcompete microbial pathogens present in the gastrointestinal tract. In some embodiments, the administration of compositions of the present disclosure to cows harboring microbial pathogens outcompetes the pathogens and clears cows of the pathogens. In some embodiments, the administration of compositions of the present disclosure results in the stimulation of host immunity, and aid in clearance of the microbial pathogens. In some embodiments, the administration of compositions of the present disclosure introduce microbes that produce bacteriostatic and/or bactericidal components that decrease or clear the cows of the microbial pathogens. (U.S. Pat. No. 8,345,010).

[0366] In some embodiments, challenging cows with a microbial colonizer or microbial pathogen after administering one or more compositions of the present disclosure prevents the microbial colonizer or microbial pathogen from growing to a relative abundance of greater than 15%, 14%, 13%, 12%, 11%, 10%, 9%, 8%, 7%, 6%, 5%, 4%, 3%, 2%, 1%, 0.5%, 0.1%, or 0.01%. In further embodiments, challenging cows with a microbial colonizer or microbial pathogen after administering one or more compositions of the present disclosure prevents the microbial colonizer or microbial pathogen from colonizing cows.

[0367] In some embodiments, clearance of the microbial colonizer or microbial pathogen occurs in less than 25 days, less than 24 days, less than 23 days, less than 22 days, less than 21 days, less than 20 days, less than 19 days, less than 18 days, less than 17 days, less than 16 days, less than 15 days, less than 14 days, less than 13 days, less than 12 days, less than 11 days, less than 10 days, less than 9 days, less than 8 days, less than 7 days, less than 6 days, less than 5 days, less than 4 days, less than 3 days, or less than 2 days post administration of the one or more compositions of the present disclosure.

[0368] In some embodiments, clearance of the microbial colonizer or microbial pathogen occurs within 1-30 days, 1-25 days, 1-20 day, 1-15 days, 1-10 days, 1-5 days, 5-30 days, 5-25 days, 5-20 days, 5-15 days, 5-10 days, 10-30 days, 10-25 days, 10-20 days, 10-15 days, 15-30 days, 15-25 days, 15-20 days, 20-30 days, 20-25 days, or 25-30 days post administration of the one or more compositions of the present disclosure.

### Improved Traits

[0369] In some aspects, the present disclosure is drawn to administering microbial compositions described herein to ruminants to improve one or more traits through the modulation of aspects of milk production, milk quantity, milk quality, ruminant digestive chemistry, and efficiency of feed utilization and digestibility.

[0370] In some embodiments, improving the quantity of milk fat produced by a ruminant is desirable, wherein milk fat includes triglycerides, triacylglycerides, diacylglycerides, monoacylglycerides, phospholipids, cholesterol, glycolipids, and free fatty acids. In further embodiments, free fatty acids include short chain fatty acids (i.e., C4:0, C6:0, and C8:0), medium chain fatty acids (i.e., C10:0, C10:1, C12:0, C14:0, C14:1, and C15:0), and long chain fatty acids (i.e., C16:0, C16:1, C17:0, C17:1, C18:0, C18:1, C18:2, C18:3, and C20:0). In further embodiments, it is desirable to achieve an increase in milk fat efficiency, which is measured by the total weight of milk fat produced, divided by the weight of feed ingested. The weight of milk fat produced is calculated from the measured fat percentage multiplied by the weight of milk produced.

[0371] In some embodiments, improving the quantity of carbohydrates in milk produced by a ruminant is desirable, wherein carbohydrates include lactose, glucose, galactose, and oligosaccharides. Tao et al. (2009. J. Dairy Sci. 92:2991-3001) disclose numerous oligosaccharides that may be found in bovine milk.

[0372] In some embodiments, improving the quantity of proteins in milk produced by a ruminant, wherein proteins include caseins and whey. In some embodiments, proteins of interest are only those proteins produced in milk. In other embodiments, proteins of interest are not required to be produced only in milk. Whey proteins include immunoglobulins, serum albumin, beta-lactoglobulin, and alpha-lactoglobulin.

[0373] In some embodiments, improving the quantity of vitamins in milk produced by a ruminant is desirable. Vitamins found in milk include the fat-soluble vitamins of A, D, E, and K; as well as the B vitamins found in the aqueous phase of the milk.

[0374] In some embodiments, improving the quantity of minerals in milk produced by a ruminant is desirable. Minerals found in milk include iron, zinc, copper, cobalt, magnesium, manganese, molybdenum, calcium, phosphorous, potassium, sodium, chlorine, and citric acid. Trace amounts of the following may be found in milk: aluminum, arsenic, boron, bromine, cadmium, chromium, fluorine, iodine, lead, nickel, selenium, silicon, silver, strontium, and vanadium.

[0375] In some embodiments, improving the milk yield and milk volume produced by a ruminant is desirable. In some embodiments, it is further desirable if the increase in milk yield and volume is not accompanied by simply an increase in solute volume.

[0376] In some embodiments improving energy-corrected milk (ECM) is desirable. In further embodiments, improving ECM amounts to increasing the calculated ECM output. In some embodiments, the ECM is calculated as follows: ECM=(0.327×milk pounds)+(12.95×fat pounds)+(7.2×protein pounds).

[0377] In some embodiments, improving the efficiency and digestibility of animal feed is desirable. In some embodiments, increasing the degradation of lignocellulosic components from animal feed is desirable. Lignocellulosic components include lignin, cellulose, and hemicellulose.

[0378] In some embodiments, increasing the concentration of fatty acids in the rumen of ruminants is desirable. Fatty acids include acetic acid, propionic acid, and butyric acid. In some embodiments, maintaining the pH balance in the rumen to prevent lysis of beneficial microbial consortia is desirable. In some embodiments, maintaining the pH balance in the rumen to prevent a reduction of beneficial microbial consortia is desirable.

[0379] In some embodiments, decreasing the amount of methane and manure produced by ruminants is desirable.

[0380] In some embodiments, improving the dry matter intake is desirable. In some embodiments, improving the efficiency of nitrogen utilization of the feed and dry matter ingested by ruminants is desirable.

[0381] In some embodiments, the improved traits of the present disclosure are the result of the administration of the presently described microbial compositions. It is thought that the microbial compositions modulate the microbiome of the ruminants such that the biochemistry of the rumen is changed in such a way that the ruminal liquid and solid substratum are more efficiently and more completely degraded into subcomponents and metabolites than the rumens of ruminants not having been administered microbial compositions of the present disclosure.

[0382] In some embodiments, the increase in efficiency and the increase of degradation of the ruminal substratum result in an increase in improved traits of the present disclosure.

### Mode of Action: Digestibility Improvement in Ruminants

[0383] The rumen is a specialized stomach dedicated to the digestion of feed components in ruminants. A diverse microbial population inhabits the rumen, where their primary function revolves around converting the fibrous and non-fibrous carbohydrate components into useable sources of energy and protein (FIG. 16). Cellulose, in particular, forms up to 40% of plant biomass and is considered indigestible by mammals. It also is tightly associated with other structural carbohydrates, including hemicellulose, pectin, and lignin. The cellulolytic microbes in the rumen leverage extensive enzymatic activity in order break these molecules down into simple sugars and volatile fatty acids. This enzymatic activity is critical to the extraction of energy from feed, and more efficient degradation ultimately provides more energy to the animal. The soluble sugars found in the non-fibrous portion of the feed are also fermented into gases and volatile fatty acids such as butyrate, propionate, and acetate. Volatile fatty acids arising from the digestion of both the fibrous and non-fibrous components of feed are ultimately the main source of energy of the ruminant.

[0384] Individual fatty acids have been tested in ruminants in order to identify their impacts on varying aspects of production.

[0385] Acetate: Structural carbohydrates produce large amounts of acetate when degraded. An infusion of acetate directly into the rumen was shown to improve the yield of milk, as well as the amount of milk fat produced. Acetate represents at least 90% of acids in the peripheral blood—it is possible that acetate can be directly utilized by mammary tissue as a source of energy. See Rook and Balch. 1961. Brit. J. Nutr. 15:361-369.

[0386] Propionate: Propionate has been shown to increase milk protein production, but decrease milk yield. See Rook and Balch. 1961. Brit. J. Nutr. 15:361-369.

[0387] Butyrate: An infusion of butyrate directly into the rumen of dairy cows increases milk fat production without changing milk yield. See Huhtanen et al. 1993. J. Dairy Sci. 76:1114-1124.

### Network Analysis

[0388] A network and/or cluster analysis method, in one embodiment, is used to measure connectivity of the one or more strains within a network, wherein the network is a collection of two or more samples that share a common or similar environmental parameter. In one embodiment, network analysis comprises linkage analysis, modularity analysis, robustness measures, betweenness measures, connectivity measures, transitivity measures, centrality measures or a combination thereof. In another embodiment, network analysis comprises predictive modeling of network through link mining and prediction, social network theory, collective classification, link-based clustering, relational similarity, or a combination thereof. In another embodiment, network analysis comprises mutual information, maximal information coefficient (MIC) calculations, or other nonparametric methods between variables to establish connectivity. In another embodiment, network analysis comprises differential equation based modeling of populations. In yet another embodiment, network analysis comprises Lotka-Volterra modeling.

[0389] The environmental parameter can be a parameter of the sample itself, e.g., pH, temperature, amount of protein in the sample. Alternatively, the environmental parameter is a parameter that affects a change in the identity of a microbial community (i.e., where the “identity” of a microbial community is characterized by the type of microorganism strains and/or number of particular microorganism strains in a community), or is affected by a change in the identity of a microbial community. For example, an environmental parameter in one embodiment, is the food intake of an animal or the amount of milk (or the protein or fat content of the milk) produced by a lactating ruminant In one embodiment, the environmental parameter is the presence, activity and/or abundance of a second microorganism strain in the microbial community, present in the same sample. In some embodiments, an environmental parameter is referred to as a metadata parameter.

[0390] Other examples of metadata parameters include but are not limited to genetic information from the host from which the sample was obtained (e.g., DNA mutation information), sample pH, sample temperature, expression of a particular protein or mRNA, nutrient conditions (e.g., level and/or identity of one or more nutrients) of the surrounding environment/ecosystem), susceptibility or resistance to disease, onset or progression of disease, susceptibility or resistance of the sample to toxins, efficacy of xenobiotic compounds (pharmaceutical drugs), biosynthesis of natural products, or a combination thereof.

### Bovine Somatotropin/Bovine Growth Hormone

[0391] Bovine somatotropin (bST), also known as bovine growth hormone, is an animal drug approved by FDA to increase milk production in dairy cows. This drug is based on the somatotropin naturally produced in cattle. Somatotropin is a protein hormone produced in the pituitary gland of animals, including humans, and is essential for normal growth, development, and health maintenance.

[0392] FDA approved a bST product in 1993 with the brand name “Posilac™” (sometribove zinc suspension). Posilac™ is approved for over-the-counter use in dairy cows starting at around 2 months after the cow has a calf until the end of the lactation period. During this time, cows are injected with Posilac™ subcutaneously (under the skin) every 14 days. A cow's typical lactation period is approximately 10 months long, starting right after she has a calf Thus, treated dairy cows are typically given Posilac™ for about 8 months of the year.

[0393] Dairy cows treated with Posilac™ exhibit a milk yield of approximately 9.9 pounds and energy corrected milk of approximately 8.72 pounds post-peak (greater than 90 days in milk) compared to control. As shown below in Example 4, dairy cows supplemented with Treatment 2 resulted in improved milk yield and milk compositional characteristics compared to control animals in weeks 6 to 24 of the trial. The trial is still ongoing and it is expected that cows supplemented with Treatment 2 will reach milk yields similar to Posilac™ by the end of the trial. Therefore, microbial supplementation in dairy cows is the same or better than the industry standard Posilac™.

[0394] In some embodiments, the present disclosure provides microbial compositions that perform the same or better than bovine growth hormone (e.g., Posilac™) in dairy cows. In some embodiments, the composition comprises one or more microorganisms from Table 1 and/or Table 3. In some embodiments, the composition comprises: a Clostridium sp. comprising a 16S nucleic acid sequence sharing at least about 97% sequence identity to SEQ ID NO; 28; a Pichia sp. comprising an ITS nucleic acid sequence sharing at least about 97% sequence identity to SEQ ID NO: 32; a Ruminococcus sp. comprising a 16S nucleic acid sequence sharing at least about 97% sequence identity to SEQ ID NO: 2108; and/or a Butyrivibrio sp. comprising a 16S nucleic acid sequence sharing at least about 97% sequence identity to SEQ ID NO: 2067. In some embodiments, the composition comprises: a Clostridium sp. comprising a 16S nucleic acid sequence of SEQ ID NO: 28; a Pichia sp. comprising an ITS nucleic acid sequence of SEQ ID NO: 32; a Ruminococcus sp. comprising a 16S nucleic acid sequence of SEQ ID NO: 2108; and/or a Butyrivibrio sp. comprising a 16S nucleic acid sequence of SEQ ID NO: 2067.

### EXAMPLES

### Example 1. Identification and Characterization of Ruminococcus bovis

[0395] Applicant has identified a novel Ruminococcus sp. referred to herein as Ruminococcus bovis. This microorganism was recovered from the rumen content of a healthy, Holstein dairy cow and was taxonomically predicted to be Ruminococcus bromii based on sequencing of the 16S rRNA gene. However, upon further characterization, Applicant discovered that this was a novel species and named the species Ruminococcus bovis.

[0396] Applicant originally experienced difficulty obtaining a pure culture of the novel Ruminococcus sp. and therefore, it was deposited at the Bigelow depository as an enriched culture. The Bigelow deposit accession numbers and 16S rRNA sequence of this novel Ruminococcus sp. was first described in PCT Application No. PCT/US2017/012573 (incorporated by reference herein) and was identified in the application as SEQ ID NO: 1.

[0397] Applicant was eventually able to isolate Ruminococcus bovis into pure culture and characterized the isolate as described in Example 2 below. Isolated Ruminococcus bovis comprises a 16S rRNA sequence that differs by two nucleotides to the original Ruminococcus bovis of SEQ ID NO: 1. The isolate was deposited at the USDA, ATCC, and NCTC depositories. Isolated Ruminococcus bovis is described for the first time in the present application and is identified as SEQ ID NO: 2108.

[0398] Isolated Ruminococcus bovis (SEQ ID NO: 2108) underwent a series of preservation challenges and recoveries in order to improve yield, which is further described in Example 3 below. The Ruminococcus bovis strain recovered from this serial preservation challenge had a number of mutations in whole genome compared to the Ruminococcus bovis strain before the serial preservation challenge (see, Table 18 in Example 3). This novel Ruminococcus bovis strain exhibited a dramatic increase in survival compared to the Ruminococcus bovis strain before the serial preservation challenge (see, Table 17 in Example 3).

[0399] Therefore, the present application describes for the first time novel Ruminococcus bovis strains with unique characteristics.

### Example 2. Ruminococcus bovis sp. Nov., a Novel Species of Amylolytic Ruminococcus Isolated from the Rumen of a Dairy Cow

[0400] This study presents JE7A12^{T}, an isolate from the ruminal content of a dairy cow. The genus Ruminococcus was first described by A. Kaars Sijpesteijn with Ruminococcus flavefaciens as the type strain (Sijpesteijn A K, Kaars Sijpesteijn A. Vol. 15, Antonie van Leeuwenhoek. 1949. p. 49-52; Sijpesteijn A K. J Gen Microbiol. 1951 November; 5(5 Suppl.):869-79). Previously, Ruminococcus have been isolated from the rumen and gastrointestinal tract of a wide variety of animals including humans (Ezaki T. Ruminococcus [Internet]. Bergey's Manual of Systematics of Archaea and Bacteria. 2015. p. 1-5). The genus is polyphyletic and divided into two groups. Ruminococcus group 1 includes the type strain Ruminococcus flavefaciens, Ruminococcus albus, Ruminococcus bromii, and Ruminococcus callidus. Ruminococcus group 2 species have recently undergone taxonomic re-classification with many species being reassigned to different genera. It is now believed that true members of the genus Ruminococcus are the species found in group 1 (Liu C et al. Vol. 58, International Journal of Systematic and Evolutionary Microbiology. 2008. p. 1896-902). The following description pertains to the isolation and the classification of a novel group 1 amylolytic species, strain JE7A12^{T}, of the genus Ruminococcus.

### Isolation and Phenotypic Characterization

[0401] JE7A12^{T} was recovered from the rumen content of a healthy, Holstein dairy cow obtained from Dairy Experts (Tulare, Calif., USA). After 48 hours of anaerobic incubation at 37-39° C., JE7A12^{T} displays off-white-colored colonies on supplemented Bacto Tryptic Soy Broth (TSB-FAC) (BD, San Jose, Calif., USA). Gram-staining was performed as described by Jones et al. (Jones D. Manual of Methods for General Bacteriology [Internet]. Vol. 34, Journal of Clinical Pathology. 1981. p. 1069-1069). Cell morphology was observed under Accu-Scope EXC-350 light microscope at 1000× magnification using cells grown for 48 h at 37° C. on TSB+FAC. Consistent with previous descriptions of the genus, JE7A12^{T} is a strictly anaerobic coccoid, commonly found in pairs and chains (Ezaki T. Ruminococcus [Internet]. Bergey's Manual of Systematics of Archaea and Bacteria. 2015. p. 1-5). Although isolated from rumen content, JE7A12^{T} does not require rumen fluid for growth.

[0402] Carbohydrate fermentation of JE7A12^{T} was qualitatively measured using the API 50CH carbon panel (BioMérieux, Marcy-l'Étoile, France). JE7A12^{T} cells were grown to late exponential phase and recovered by centrifugation at 3,000×g for 10 minutes. Cells were resuspended and 0.017% (wt/vol) bromocresol purple added as a pH indicator for acidification of carbohydrates (Avgustin G et al. Int J Syst Bacteriol. 1997 April; 47(2):284-8.). Closely related Ruminococcus strains derived from the bovine rumen are unable to ferment glucose, fructose, galactose while their human derived counterparts are able to utilize these carbon sources (Mukhopadhya I et al. Environ Microbiol. 2018 January; 20(1):324-36). Therefore, fermentation of glucose, fructose, and galactose in combination with genomic data could act to differentiate JE7A12^{T} from closely related, rumenally derived, Ruminococcus.

[0403] Metabolite production was measured using a Waters Acquity UPLC Q System with RI detector. The column used was a Phenomenex 00H-0138-KO Rezex ROA Organic Acid H+(8%) operated at 60° C. The mobile phase was 0.00325 N H2S04 at 0.5 mL/min. Pure standards were used for calibration at varying concentrations. JE7A12^{T} produces acetate as a major fermentation product as well as ethanol and glycerol as minor products. Major fermentation product comparison between JE7A12^{T} and other species in the genus Ruminococcus are shown in Table 14 below.

TABLE 14
Major Fermentation Products of JE7A12^{T} and
other members of the genus Ruminococcus

| Organism | Product |
|---|---|
| JE7A12^{T} | Acetate |
| R. albus | Acetate, Formate |
| R. bromii | Acetate |
| R. callidus | Succinate |
| R. champanellensis | Acetate, Succinate |
| R. flavefaciens | Acetate, Formate, Succinate |
| R. gauvreauii | Acetate |
| R. gnavus | Acetate, Formate |
| R. lactaris | Acetate, Formate |
| R. torques | Lactate |

[0404] The data shown in Table A for R. albus, R. bromii, R. flavefaciens, R. callidus, R. gnavus, R. lactaris, R. torques as represented in paper from Ezaki (Ezaki T. Ruminococcus [Internet]. Bergey's Manual of Systematics of Archaea and Bacteria. 2015. p. 1-5). R. champanellensis data as represented by Chassard et al. (Chassard C et al. Ruminococcus champanellensis sp. nov., a cellulose-degrading bacterium from human gut microbiota [Internet], Vol. 62, International Journal of Systematic and Evolutionary Microbiology. 2012. p. 138-43). R. gauvreauii data as represented by Domingo et al. (Domingo M-C et al. Ruminococcus gauvreauii sp. nov., a glycopeptide-resistant species isolated from a human faecal specimen [Internet]. Vol. 58, International Journal of Systematic and Evolutionary Microbiology. 2008. p. 1393-7).

### Genomic Characterization

[0405] The 16S rRNA gene was amplified from JE7A12^{T} using 27F and 534R primers (Lane et al., 1991; Muyzer et al., 1992) and paired-end sequenced (2×300 bp) on an Illumina Miseq. The resulting sequence was quality trimmed and compared to the NCBI database. The closest neighbors to JE7A12^{T} based on sequence similarity were Ruminococcus bromii (90°), Butyricicoccus pullicaecorum (89%), and Colidextribacter massiliensis (89%). Whole genome sequence of JE7A12^{T} was generated using hybrid methods as described by Jain et al. Nat Biotechnol. 2018 April; 36(4):338-45.). Whole genome size and GC content were compared between JE7A12^{T} and phylogenetically close neighbors as well as other members of the genus Ruminococcus. The results are shown in Table 15 below. GC content of JE7A12^{T} should act as a differentiating characteristic for the species as it is lower than the any other member in the genus.

TABLE 15
Comparison of genome size and GC content between
JE7A12^{T} and members of the genus Ruminococcus
as well as phylogenetically close organisms

| | Genome | GC |
|---|---|---|
| | Size | Content |
| Genus species (GenBank Accession #) | (Mbp) | (%) |
| Ruminococcus bovis JE7A12^{T} | 2.44 | 34.6 |
| Anaeromassilibacillus sp. An172 (GCA_002160515) | 2.81 | 49.1 |
| Clostridium sp. (GCA_000431855) | 2.25 | 35.9 |
| Clostridium sp. (GCA_000435335) | 2.11 | 35.9 |
| Eubacterium sp. (GCA_000436775 ) | 1.97 | 38 |
| Eubacterium sp. (GCA_000437975 ) | 1.9 | 38 |
| Ruminococcaceae bacterium P7 (GCA_900100595) | 3.06 | 50.3 |
| Ruminococcus albus DSM 20455 (GCA_000179635) | 4.48 | 44.5 |
| Ruminococcus bromii YE282 (GCA_900101355) | 2.54 | 40.7 |
| Ruminococcus callidus ATCC 27760 | 3.01 | 49 |
| (GCA_000468015) | | |
| Ruminococcus champanellensis DSM 18848 | 2.57 | 53.33 |
| (GCA_000210095) | | |
| Ruminococcus flavefaciens ATCC 19208 | 3.59 | 45.9 |
| (GCA_000518765) | | |
| Ruminococcus gauvreauii DSM 19829 | 4.09 | 47.6 |
| (GCA_000425525) | | |
| Ruminococcus gnavus AGR2154 (GCA_000526735) | 3.72 | 42.5 |
| Ruminococcus lactaris ATCC 29176 | 2.73 | 42.7 |
| (GCA_000155205) | | |
| Ruminococcus sp. (GCA_000433495) | 2.09 | 44.2 |
| Ruminococcus torques ATCC 27756 | 2.74 | 42 |
| (GCA_000153925) | | |

[0406] To further investigate taxonomic identity whole genome average nucleotide identity (AM) was compared between JE7A12^{T} and closely related whole genomes (Richter M K Rosselló-Móra R Proc Natl Acad Sci USA. 2009 Nov. 10; 106(45):19126-31.). Genomes used for comparison were selected based on phylogenetic proximity. Additionally, all current species of Ruminococcus were included in the ANI analysis. The results are shown in FIG. 4. Of the genomes with cultured representatives, there were no matches at the suggested 95% cutoff for defining a species (Yoon et al. Antonie Van Leeuwenhoek. 2017 October; 110(10):1281-6; and Goris J et al. Int J Syst Evol Microbiol. 2007 Jan. 1; 57(1):81-91).

[0407] The best match from a cultured genome with standing nomenclature was Ruminococcus bromii. Though the two strains are still genetically distant, with 88% sequence similarity between the two, but with only 2.1% coverage of the genome. The closest overall match is an uncultured Eubacterium with no standing nomenclature. Whole genome nucleotide dissimilarity should be used as a strong differentiator of JE7A12^{T} from the other taxa in the genus.

### Phylogeny

[0408] 16S based phylogeny was computed by the neighbor-joining method using MEGA X (Kumar S et al. Mol Biol Evol. 2018 Jun. 1; 35(6):1547-9.). JE7A12^{T} was placed in a dendrogram of all Ruminococcus isolates available in the RDP database (Cole J R et al. Nucleic Acids Res. 2014 January; 4:D633-42.). The resulting dendrogram is presented in FIG. 5. Whole Genome phylogeny was inferred by PhyloPhlan (Segata N et al. PhyloPhlAn is a new method for improved phylogenetic and taxonomic placement of microbes. Nat Commun. 2013; 4:2304) using JE7A12^{T} whole genome amino acid sequence. JE7A12^{T} was placed in a dendrogram with whole genome sequences from the NCBI database. The resulting dendrogram is presented in FIG. 6.

Description of Ruminococcus bovis sp. nov.

[0409] Ruminococcus bovis (bo.vis. bos, bovis L. m. gen. n. of the cow)

[0410] Ruminococcus bovis is an obligate anaerobe, catalase negative, and oxidase negative bacterium. It gram stains gram-variable (FIG. 7) and forms chains of small cocci when cultured in liquid medium (FIG. 8). When cultured on TSB+FAC solid medium, it forms small, slightly opaque, off-white, circular colonies with even margins. The genome GC content is 34.6%. API 50CH carbon panel results are shown in Table 16 below. The major fermentation product is acetate, ethanol and glycerol are minor fermentation products. No lactate, butyrate, butanol, propionate, succinate, or pyruvate is produced.

[0411] The type strain (PTA-125917, NRRL B-67764) originally collected as JE7A12, was isolated from rumen content of a healthy, Holstein cow from Dairy Experts (Tulare, Calif., USA).

TABLE 16
JE7A12^{T} API 50CH carbon panel

| Component | JE7A12^{T} | Component | JE7A12^{T} | Component | JE7A12^{T} |
|---|---|---|---|---|---|
| Glycerol | No Growth | D-Adonitol | No Growth | L-Rhamnose | No Growth |
| Erythritol | No Growth | Methyl-BD- | No Growth | Dulcitol | No Growth |
| | | xylopyranoside | | | |
| D-Arabinose | No Growth | D-Galactose | Growth | Inositol | No Growth |
| L-Arabinose | No Growth | D-Glucose | Growth | D-Mannitol | No Growth |
| D-Ribose | No Growth | D-Fructose | Growth | D-Sorbitol | No Growth |
| D-xylose | No Growth | D-Mannose | No Growth | Methyl-aD- | No Growth |
| | | | | Mannopyranoside | |
| Amygdalin | No Growth | L-Sorbose | No Growth | Methyl-aD- | No Growth |
| | | | | Glucopyranoside | |
| Arbutin | No Growth | D-Saccharose | No Growth | N- | No Growth |
| | | | | AcetylGlucosamine | |
| Esculin/Ferric | No Growth | D-Trehalose | No Growth | D-Lyxose | No Growth |
| Citrate | | | | | |
| Salicin | No Growth | Inulin | No Growth | D-Tagatose | No Growth |
| D-Cellobiose | No Growth | D-Melezitose | No Growth | D-Fucose | No Growth |
| D-Maltose | Growth | D-Raffinose | No Growth | L-Fucose | No Growth |
| D-Lactose | No Growth | Starch | Growth | D-Arabitol | No Growth |
| | | Glycogen | Growth | L-Arabitol | No Growth |
| Potassium 5- | No Growth | Xylitol | No Growth | D-Turanose | Growth |
| KetoGluconate | | | | | |
| Potassium | No Growth | Gentiobiose | No Growth | D-Melibiose | No Growth |
| Gluconate | | | | | |
| Potassium 2- | No Growth | | | | |
| KetoGluconate | | | | | |

### CONCLUSION

[0412] This study presents JE7A12^{T}, an isolate from the ruminal content of a dairy cow. Phenotypic and genotypic traits of the isolate were explored. JE7A12^{T} was found to be a strictly anaerobic, catalase negative, oxidase negative, coccoid bacterium that grows in chains. API 50 CH carbon source assay showed growth on D-glucose, D-fructose, D-galactose, glycogen, and starch. HPLC showed acetate as the major fermentation product as result of carbohydrate fermentation. Phylogenetic analysis of JE7A12^{T} based on 16S rRNA nucleotide sequence and whole genome amino acid sequence show a divergent lineage from the closest neighbors in the genus Ruminococcus. 16S sequence comparison, whole genome average nucleotide identity (ANI), and GC content data suggest that JE7A12^{T} represents a novel species for which we propose the name Ruminococcus bovis sp nov. with JE7A12^{T} as the type strain.

### Example 3. Serial Preservation Challenges of Ruminococcus bovis

[0413] R. bovis (Ascusb_5) was subjected to a series of preservation challenges and recoveries in order to improve yield through a serial preservation process.

### Methods

[0414] R. bovis was subjected to three rounds of Preservation by Vaporization (PBV) challenges. Briefly, an aliquot from a glycerol stock was streaked onto a growth plate. After an appropriate incubation time, a single colony was selected and used to inoculate a seed tube of Tryptic Soy Broth. The seed tube inoculate was cultured to allow bacterial expansion and the expanded bacterial culture was then used to inoculate the main fermentation culture. The bacterial cells were cultured in the main fermentation culture until mid-stationary phase. Loading sugars are included, if necessary. After 40 hours, cells were harvested and combined with preservation solutions to produce a preservation mixture.

[0415] For preservation, 100 μL of each preservation mixture was dispensed into a 2 mL serum vial, which was then sealed with a lyophilization cap and placed the vials in an aluminum lyophilizer block. The vials were frozen at −80° C. for at least one hour and then the vials were transferred to the lyophilizer in the aluminum block. Lypholization caps were changed to the open position and the following lyophilization program was executed:

[0416] (a) Freeze at −17° C. at atmospheric pressure for 30 minutes

[0417] (b) Freeze at −17° C. at 1000 mTorr for 15 minutes

[0418] (c) Freeze at −17° C. at 300 mTorr for 15 minutes

[0419] (d) Incubate at 30° C. at 300 mTorr for 24 hours

[0420] (e) Incubate at 40° C. at 300 mTorr for 24 hours

[0421] (f) Hold at 25° C.

[0422] All vials are then removed from the lyophilizer and rehydrated in the following manner:

[0423] (a) 1 mL of sterile PBS is added to each vial (effectively a 10× dilution to the initial preservation mixture) and reconstituted by slowly pipetting up and down. This mixture was then diluted 6 additional logs (for a total dilution of E-07) and a 5 μL aliquot from each vial was spot plated for CFU determination.

[0424] (b) A separate aliquot of the reconstituted PBV product was streaked onto a plate as the starting plate (a “rescue” plate) for re-inoculation in subsequent.

[0425] A second and third round of PBV is then performed according to the protocol described above, using the “rescue” plates as the initial source of bacteria for inoculation of the seed tube.

### Results

[0426] The results from Round 1-3 for Ascusb_5 are presented in Table 17 below. As shown, there was a dramatic increase in the Survival % of Colony Forming Units (CFU)/mL for Ascusb_5 of SEQ ID NO: 2108 from Round 1 (RCB) to Round 2 (Rescue 1).

TABLE 17
CFU Titer and PBV survival of R. bovis

| | | | Titer | PBV |
|---|---|---|---|---|
| Round | Microbe | Inoculant source | (CFU/mL) | Survival (%) |
| 1 | Ascusb_5 | RCB | 7.70E+08 | 0.0013% |
| 2 | Ascusb_5 | Rescue plate Round 1 | 6.70E+08 | 30% |
| 3 | Ascusb_5 | Rescue plate Round 2 | 4.93E+08 | 20% |

[0427] The genomes of the RCB isolate and the Round 3 isolate of Ascusb_5 were sequenced to determine any genomic changes as a result of the serial passage. Briefly, DNA was isolated from R. bovis using a Qiagen Powersoil Pro kit. Short read sequencing libraries were prepared from the isolated DNA using the Nextera XT kit (Illumina, San Diego, Calif.) by the manufacturer's recommended protocol. Libraries were sequenced on an Illumina MiSeq (1×300 bp). Reads were mapped to the reference genome using bowtie2 (Langmead B, Salzberg S. (2012) Fast gapped-read alignment with Bowtie 2. Nature Methods. 9: 357-359) and analyzed for mutations using breseq (Deatherage D E, Barrick J E. (2014) Identification of mutations in laboratory-evolved microbes from next-generation sequencing data using breseq. Methods Mol. Biol. 1151: 165-188).

[0428] A summary of the mutations is presented in Table 18 below. Mutations 7 and 8 are silent mutations and unlikely to result in significant effects. Mutations 2, 3, 5, and 6 affect either integrases or transposases and are unlikely to affect preservation tolerance. Mutation 1 is likely the key mutation resulting in the improvement of preservation tolerance in Ascusb_5. It occurs 4 bp upstream of the Galactose operon repressor, GalR-LacI. This key protein represses transcription of a host of genes related to carbohydrate uptake and metabolism. As cryoprotectant uptake, often in the form of non-reducing sugars, is a key step in preservation tolerance, a change in the regulation of sugar uptake could result in a dramatic improvement in preservation tolerance. The phosphomannomutase could provide another key mutation, perhaps disrupting the metabolism of preservation sugars and enabling intracellular accumulation. The Ascusb_5 microbe from round 3 did not exhibit any mutations in its 16S nucleic acid sequence (SEQ ID NO: 2108).

TABLE 18
R. bovis mutation summary

| | Mutation | | | |
|---|---|---|---|---|
| | position | Change | Description | Protein Description |
| 1 | 676,590 | G→T | intergenic (−223/−4) | Melibiose carrier protein, Na+, |
| | | | | melibiose symporter/Galactose |
| | | | | operon repressor, GalR-LacI |
| | | | | family of transcriptional regulators |
| 2 | 759,729 | 2 bp→TA | coding (306-307/633 nt) | hypothetical protein (integrase) |
| 3 | 759,735 | T→G | K101Q (AAG→CAG) | hypothetical protein (integrase) |
| 4 | 1,403,355 | (A)_{5→4} | coding (23/1503 nt) | Phosphomannomutase |
| 5 | 1,450,594 | 3 bp→TTC | coding (55-57/300 nt) | hypothetical protein (transposase) |
| 6 | 1,546,754 | +T | coding (84/126 nt) | hypothetical protein (transposase) |
| 7 | 1,667,526 | C→T | Y399Y (TAC→TAT) | hypothetical protein |
| 8 | 2,124,083 | C→A | G414G (GGC→GGA) | Excinuclease ABC subunit B |
| 9 | 2,437,094 | +AC | coding (233/240 nt) | hypothetical protein |
| | | | | (stage II sporulation protein) |

### Example 4. Microbial Supplementation in Dairy Cows

[0429] This study examines the effect of microbial supplementation on feed efficiency, milk yield, and milk compositional characteristics in dairy cows.

### Materials and Methods

[0430] A total of 90 multi-parous cows were brought to the Research Barn at least 10 days prior the experimental phase of the study to adapt to facilities and feeding system. Thereafter, cows were blocked based on milk yield and assigned to 1 of 3 groups and followed for 150 days.

[0431] The treatment groups are shown in Table 19 below. The control group received a total mixed ration without microbial supplementation.

TABLE 19
Treatment Groups

| Group | Microorganisms | Dose | Carrier |
|---|---|---|---|
| Treat- | Clostridium sp. (SEQ ID NO: 28) | 2E6 CFU/g | Calcium |
| ment 1 | Pichia kudriavzevii (SEQ ID NO: 32) | 2E7 CFU/g | carbonate |
| | | | and zeolite |
| Treat- | Clostridium sp. (SEQ ID NO: 28) | 2E6 CFU/g | Calcium |
| ment 2 | Pichia kudriavzevii (SEQ ID NO: 32) | 2E7 CFU/g | carbonate |
| | | | and zeolite |
| | Ruminococcus bovis (SEQ ID NO: | 2E7 CFU/g | |
| | 2108) | | |
| | Butyrivibrio fibrisolvens (SEQ ID | 2E7 CFU/g | |
| | NO: 2067) | | |
| Control | None | None | Calcium |
| | | | carbonate |
| | | | and zeolite |

[0432] Cows in all treatment groups shared the same housing space, which is a roof covered pen bedded with sand. Adjacent to this area was a cow traffic alley with feed mangers and waterers providing ad libitum feed and water. Cows were milked twice a day in a double 10 parallel parlor.

[0433] All cows were fed the same ration other than the microorganisms included in the feed. A total mixed ration (TMR) was delivered twice a day into 48 feed mangers of which 16 were assigned to each group (Treatment 1, Treatment 2, and control) following a sequential order.

[0434] A TMR load was prepared once a day using a feed mixing wagon. The amount of TMR prepared every day for cows in the study was 105% of the previous day average intake. First, feed to be fed to cows assigned to Treatment 1 (105% of the previous day average intake for the study group) was unloaded into a long strip over the floor and 150 g of product was spread along the top of the strip. Second, feed from the same load to be fed to cows assigned to Treatment 2 was unloaded into another feed strip over the floor and 150 g of product was spread along the top of the strip. Third, the last portion of the feed from the same load to be fed to cows assigned to Control was delivered into feed mangers assigned to that study group. An empty wagon returned to the feed preparation area and the strip of feed assigned to Treatment 1 cows was loaded into the wagon, mixed for a minimum of 10 minutes, and delivered into mangers assigned to Treatment 1. Finally, an empty wagon returned to the feed preparation area and the strip of feed assigned to Treatment 2 cows was loaded into the wagon, mixed for a minimum of 10 minutes, and delivered into mangers assigned to Treatment 2.

[0435] Feed intake was recorded individually for each cow and continuously with automatic feed mangers placed on weighing cells using the BioControl Controlling and Recording Feed Intake (CRFT) system (Biocontrol, CRFI, Rakkestad, Norway). The CRFI system limits the access of cows to the different mangers depending on the treatment to which were assigned. It allows all cows assigned to the same treatment group to access all feed mangers with that treatment. Records were available from three days before until the end of the experimental phase of the study.

[0436] Milk yield: Individual cow milk yield was recorded at each milking using an electronic milk meter (AfiMilk MPC, Afikim, Israel). Records were available from three days before until the end of the experimental phase of the study.

[0437] Milk composition: Individual cow milk fat, protein and lactose was measured at each milking by an optical in-line milk component analyzer (AfiLab, Afikim, Israel). Records were available from three days before until the end of the experimental phase of the study. In addition, a composite milk sample was collected from milk meters to be analyzed for milk fat, protein and lactose by the local DHIA association (Tulare DHIA, Tulare, Calif.). Records were available for milk collected at the morning milking the three days before commencement of the experimental phase of the study, and twice a week thereafter.

[0438] Body Condition Score and Weight: Cows were weighed individually after the morning milking using a PS-2000 scale (Salter Brecknell, Fairmont, Minn.) on the last day of adaptation phase, and then on experimental days 30, 60, 90, 120 and 150. A 1-5 scoring was assigned for body condition.

[0439] Feed analysis: Individual ingredients from the ration and TMR representative samples were analyzed for nutritional and mineral content at DairyExperts Feeds Lab (DairyExperts, Inc, Tulare, Calif.). Ingredients were sampled once during adaptation and once during the experimental phase. TMR was sampled once during adaptation and once a week during the Intervention period.

[0440] A number of outcomes were evaluated, including:

[0441] (a) Dry Matter Intake (DMI): the feed consumed (Kg) per cow in an as fed basis times the dry matter percentage of the feed obtained from the laboratory analysis;

[0442] (b) Daily Milk Yield: calculated as the sum of both morning and afternoon milk weights (Kg);

[0443] (c) 3.5% Fat Corrected Milk (FCM): milk yield value corrected for 3.5% fat using formula from NRC (2001): [(0.4324×kg of milk)+(16.216×kg of fat)];

[0444] (d) Energy Corrected Milk (ECM): milk yield value corrected for 3.5% fat and 3.2% true protein using formula from NRC (2001): [(0.3246×kg of milk)+(12.86×kg of fat)+(7.04×kg of true protein)];

[0445] (e) Milk Components Percentage: daily milk crude protein (%), fat (%), and lactose (%) was calculated as the average of both morning and afternoon readings from the in-line sensor. Also, DHIA results were available from the samples collected at the morning milking on the days previously listed;

[0446] (f) Milk Components Yield: obtained by multiplying daily milk crude protein (%), fat (%), lactose (%) by the daily milk yield (Kg);

[0447] (g) Feed Efficiency: defined as Kg of 3.5% FCM produced per Kg of DM consumed; and

[0448] (h) Body Condition Score and Weight: these variables were analyzed for the measurements taken at different time points.

[0449] Table 20 below shows a summary of parameters from cows in control, Treatment 1, and Treatment 2 at the beginning of the trial. ECM, energy corrected milk; DIM, days in milk; and FE, feed efficiency.

TABLE 20
Summary of Parameters at the Beginning of the Trial

| | Control | Treatment 1 | Treatment 2 |
|---|---|---|---|
| Milk Yield (lbs) | 92.27 ± 1.09 | 92.66 ± 1.32 | 93.11 ± 1.2 |
| ECM (lbs) | 86.5 ± 1.12 | 87.92 ± 1.25 | 85.01 ± 1.18 |
| Lactation | 2.34 ± 0.09 | 2.48 ± 0.09 | 2.31 ± 0.09 |
| Fat (lbs) | 2.94 ± 0.05 | 3.06 ± 0.05 | 2.81 ± 0.05 |
| Protein (lbs) | 2.52 ± 0.03 | 2.51 ± 0.04 | 2.52 ± 0.04 |
| DIM | 36.41 ± 1.17 | 36.59 ± 1.12 | 35.93 ± 1.27 |
| Intake (lbs) | 82.9 ± 1.36 | 88.94 ± 1.15 | 84.83 ± 1.13 |
| Body weight (kg) | 652.31 ± 8.97 | 665.86 ± 11.13 | 654.03 ± 6.67 |
| Body Condition | 2.98 ± 0.04 | 2.94 ± 0.06 | 2.97 ± 0.04 |

### Results

[0450] Table 21 below shows a summary of the trial results from cows in control, Treatment 1, and Treatment 2. Overall, cows in Treatment 2 performed better than cows in Treatment 1. Trt, treatment; ECM, energy corrected milk; DMI, dry matter intake; and FE, feed efficiency.

TABLE 21
Summary of Trial Results

| | | | | | | P value | |
|---|---|---|---|---|---|---|---|
| | | | | % Difference | | | Trt |
| | Control | Trt 1 | Trt 2 | Trt 1 | Trt 2 | Trt | *Time |
| Milk Yield (lbs) | 87.36 ± 1.8 | 87.97 ± 1.8 | 92.32 ± 1.79 | 0.7 | 5.67 | 0.909 | <0.001 |
| ECM (lbs) | 89.26 ± 1.74 | 89.94 ± 1.74 | 95.06 ± 1.73 | 0.77 | 6.5 | 0.888 | <0.001 |
| Fat (%) | 3.78 ± 0.05 | 3.83 ± 0.05 | 3.69 ± 0.05 | 1.2.7 | −2.42 | 0.114 | 0.67 |
| Fat (lbs) | 3.24 ± 0.07 | 3.26 ± 0.07 | 3.45 ± 0.07 | 0.74 | 6.69 | 0.883 | <0.001 |
| Protein (%) | 3.01 ± 0.02 | 3.05 ± 0.02 | 2.99 ± 0.02 | 1.49 | −0.42 | 0.765 | <0.001 |
| Protein (lbs) | 2.61 ± 0.06 | 2.65 ± 0.06 | 2.76 ± 0.06 | 1.63 | 5.72 | 0.966 | <0.001 |
| Lactose (%) | 4.59 ± 0.04 | 4.59 ± 0.04 | 4.64 ± 0.04 | 0.05 | 1.02 | 0.674 | 0.967 |
| Lactose (lbs) | 3.99 ± 0.09 | 4.04 ± 0.09 | 4.3 ± 0.09 | 1.14 | 7.75 | 0.884 | <0.001 |
| DMI (lbs) | 59.27 ± 1.0 | 59.41 ± 1.01 | 61.32 ± 1.0 | 0.23 | 3.45 | 0.825 | <0.001 |
| FE (ECM:DMI) | 1.57 ± 0.03 | 1.59 ± 0.03 | 1.58 ± 0.03 | 1.41 | 0.49 | 0.401 | 0.001 |
| Body weight (kg) | 1512.13 ± 10.18 | 1490.65 ± 10.15 | 1495.71 ± 10.06 | −1.42 | −1.09 | 0.997 | 0.533 |
| Body Condition | 3.13 ± 0.04 | 3.15 ± 0.04 | 3.05 ± 0.04 | 0.64 | −2.41 | 0.929 | 0.441 |

[0451] Table 22 below shows a summary of the trial results pre-peak (less than 90 days in milk) from cows in control, Treatment 1, and Treatment 2. ECM, energy corrected milk; DMI, dry matter intake, and FE, feed efficiency.

TABLE 22
Summary of Trial Results Pre-Peak

| | | | | % Difference | |
|---|---|---|---|---|---|
| | Control | Treatment 1 | Treatment 2 | Treatment 1 | Treatment 2 |
| Milk Yield (lbs) | 96.31 ± 1.8 | 99.55 ± 1.8 | 98.17 ± 1.79 | 3.37 | 1.93 |
| ECM (lbs) | 91.13 ± 1.74 | 94.62 ± 1.74 | 93.83 ± 1.74 | 3.83 | 2.97 |
| Fat (%) | 3.28 ± 0.05 | 3.33 ± 0.05 | 3.21 ± 0.05 | 1.4 | −2.03 |
| Fat (lbs) | 3.11 ± 0.07 | 3.25 ± 0.07 | 3.22 ± 0.07 | 4.46 | 3.37 |
| Protein (%) | 2.79 ± 0.02 | 2.8 ± 0.02 | 2.78 ± 0.02 | 0.56 | −0.4 |
| Protein (lbs) | 2.68 ± 0.06 | 2.79 ± 0.06 | 2.74 ± 0.06 | 3.8 | 1.97 |
| Lactose (%) | 4.62 ± 0.04 | 4.63 ± 0.04 | 4.69 ± 0.04 | 0.01 | 1.39 |
| Lactose (lbs) | 4.42 ± 0.09 | 4.59 ± 0.09 | 4.61 ± 0.09 | 3.8 | 4.3 |
| DMI (lbs) | 56.12 ± 1.0 | 57.57 ± 1.01 | 57.61 ± 1.0 | 2.59 | 2.66 |
| FE (ECM:DMI) | 1.66 ± 0.03 | 1.67 ± 0.03 | 1.63 ± 0.03 | 1.01 | −1.52 |
| Body weight (kg) | 1466.26 ± 10.14 | 1459.61 ± 10.11 | 1454.53 ± 10.06 | −0.45 | −0.8 |
| Body Condition | 3.0.5 ± 0.04 | 3.1 ± 0.04 | 3.02 ± 0.04 | 1.38 | −1.23 |

[0452] Table 23 below shows a summary of the trial results post-peak (greater than 90 days in milk) from cows in control, Treatment 1, and Treatment 2. ECM, energy corrected milk; DMI, dry matter intake, and FE, feed efficiency.

TABLE 23
Summary of Trial Results Post-Peak

| | | | | % Difference | |
|---|---|---|---|---|---|
| | Control | Treatment 1 | Treatment 2 | Treatment 1 | Treatment 2 |
| Milk Yield (lbs) | 83.91 ± 1.8 | 83.36 ± 1.81 | 90.32 ± 1.79 | −0.66 | 7.64 |
| ECM (lbs) | 89.05 ± 1.74 | 88.51 ± 1.74 | 96.28 ± 1.73 | −0.61 | 8.12 |
| Fat (%) | 4.02 ± 0.05 | 4.06 ± 0.05 | 3.91 ± 0.05 | 1.22 | −2.52 |
| Fat (lbs) | 3.32 ± 0.07 | 3.29 ± 0.07 | 3.59 ± 0.07 | −0.8 | 8.07 |
| Protein (%) | 3.1 ± 0.02 | 3.16 ± 0.02 | 3.09 ± 0.02 | 1.88 | −0.49 |
| Protein (lbs) | 2.6 ± 0.06 | 2.61 ± 0.06 | 2.79 ± 0.06 | 0.66 | 7.4 |
| Lactose (%) | 4.58 ± 0.04 | 4.58 ± 0.04 | 4.62 ± 0.04 | 0.02 | 0.81 |
| Lactose (lbs) | 3.83 ± 0.09 | 3.82 ± 0.09 | 4.19 ± 0.09 | −0.24 | 9.54 |
| DMI (lbs) | 61.41 ± 1.0 | 60.7 ± 1.01 | 63.81 ± 1.0 | −1.16 | 3.9 |
| FE (ECM:DMI) | 1.52 ± 0.03 | 1.54 ± 0.03 | 1.55 ± 0.03 | 1.77 | 1.81 |
| Body weight (kg) | 1523.6 ± 10.2 | 1498.41 ± 10.16 | 1506.01 ± 10.06 | −1.65 | −1.15 |
| Body Condition | 3.15 ± 0.04 | 3.16 ± 0.04 | 3.06 ± 0.04 | 0.46 | −2.69 |

[0453] FIG. 9 shows milk yield in cows administered control, treatment 1, or treatment 2 over time.

[0454] FIG. 10 shows energy corrected milk (ECM) in cows administered control, treatment 1, or treatment 2 over time.

[0455] FIG. 11A shows percent fat in milk from cows administered control, treatment 1, or treatment 2 over time. FIG. 11B shows pounds (lbs) of fat in milk from cows administered control, treatment 1, or treatment 2 over time.

[0456] FIG. 12A shows percent protein in milk from cows administered control, treatment 1, or treatment 2 over time. FIG. 12B shows pounds (lbs) of protein in milk from cows administered control, treatment 1, or treatment 2 over time.

[0457] FIG. 13A shows percent lactose in milk from cows administered control, treatment 1, or treatment 2 over time. FIG. 13B shows pounds (lbs) of lactose in milk in cows administered control, treatment 1, or treatment 2 over time.

[0458] FIG. 14A shows dry matter intake in cows administered control, treatment 1, or treatment 2 over time. FIG. 14B shows feed efficiency (energy corrected milk to dry matter intake) in cows administered control, treatment 1, or treatment 2 over time.

[0459] FIG. 15A shows body weight of cows administered control, treatment 1, or treatment 2 over time. FIG. 15B shows body condition of cows administered control, treatment 1, or treatment 2 over time.

[0460] Overall, cows administered treatment 1 showed an increase in milk yield and energy corrected milk, and an increase in milk fat and protein from weeks 1-9 of the trial. Cows administered treatment 1 also showed increased feed efficiency consistently across the entire trial. Cows administered treatment 2 showed an increase in milk yield and energy corrected milk from weeks 6-24 of the trial, and an increase in milk fat and protein from weeks 5-24 of the trial. Cows administered treatment 2 also showed no significant decreases in body weight and condition scores.

### Example 5. Microbial Supplementation in Dairy Cows

[0461] This study examines the effect of microbial supplementation on feed efficiency, milk yield, and milk compositional characteristics.

### Materials and Methods

[0462] Seventy-two Holstein dairy cows, between 28-100 days in milk were assigned to one of three treatments (n=24 cows/trt; Control, Treatment 1, and Treatment 2). Animals were evaluated for soundness and removed before beginning trial if they exhibited feet and leg issues, were a three quartered animal or had more than one case of mastitis during calving to beginning of covariate period.

[0463] Treatments were blocked and balanced for parity, days in milk, and current milk yield. Parity was defined as primiparous (no more 30% of animals), or multiparous (2^{nd} or greater). Animals were within a range of 15-20 days in milk within the block. The level of milk production was as tight as possible with the goal being within a range of 10 lbs of milk within a block.

[0464] Cows were adapted to tie-stalls and then baseline data (covariate) was collected for 2 weeks prior to start of treatments for all cows. Cows remained on their respective treatment diets for 140 days.

[0465] The treatment groups are shown in Table 24 below. The control group received a total mixed ration without microbial supplementation.

TABLE 24
Treatment Groups

| Group | Microorganisms | Dose | Carrier |
|---|---|---|---|
| Treat- | Clostridium sp. (SEQ ID NO: 28) | 2E6 CFU/g | Calcium |
| ment 1 | Pichia kudriavzevii (SEQ ID NO: 32) | 2E7 CFU/g | carbonate |
| | | | and zeolite |
| Treat- | Clostridium sp. (SEQ ID NO: 28) | 2E6 CFU/g | Calcium |
| ment 2 | Pichia kudriavzevii (SEQ ID NO: 32) | 2E7 CFU/g | carbonate |
| | Ruminococcus bovis (SEQ ID NO: | 2E7 CFU/g | and zeolite |
| | 2108) | | |
| | Butyrivibrio fibrisolvens (SEQ ID | 2E7 CFU/g | |
| | NO: 2067) | | |
| Control | None | None | Calcium |
| | | | carbonate |
| | | | and zeolite |

[0466] A top-dress for each cow was produced daily by adding the 5 g treatment to approximately 150 g of the carrier ground corn. Treatments were top-dressed on the feed and mixed into the top 3-6 inches of the total mixed ration (TMR). Treatments were color-coded and marked on the stalls and containers delivering the top-dress to the cows. Personnel changed gloves between treatments.

[0467] Treatments were packed into a daily packet of approximately 132 g, with each packet containing enough product for each cow in the treatment group plus 10% overage. Packets were stored at 4° C.

[0468] Each day, a fresh packet was opened. 5 g was weighed out for each cow individually and mixed into approximately 150 g of ground corn. Once completed, the packet was resealed and labeled with the date opened before storing at 4° C. Approximately every 50 days, one unused packet was assayed for quality control.

[0469] The basal TMR was delivered to the barn and CALAN Data Rangers were used to weigh out individual animal feedings. Animals were given approximately 60% of food at first feeding. Cows were fed at a reasonably consistent time each day (approximately 9 am), and then the rest of feed was put in a barrel in front of cows and fed later in day to ensure feed is always available. Individual cow dry matter intake (DMI) was adjusted daily to allow for a 10% feed refusal rate. Cow feeding areas were separated using plastic panels approximately 34 in. high near cows to 20 in. at back of manger area to prevent cross contamination of feed. The test products were hand-fed once daily by top-dressing on each cow's individual TMR diet. Treatments were mixed into the top 3-6 inches of TMR

[0470] Dry Matter Intake: Dry matter intakes from −14 to 140 treatment (daily, summarized by week). Diets were offered at ad libitum intake with 10% refusals. Orts were weighed daily and daily intakes were calculated for the duration of the study.

[0471] Body Weights: Double body weights were collected at beginning and end of covariate period, every 28 days and at removal from trial. More frequent body weights were allowed and were defined by each trial site but the double body weights were a requirement. Average body weight change was calculated by 28 day periods and overall body weight change was based on body weight at end of covariate.

[0472] Body Condition Score (BCS): BCS scores were determined using the 1-5 Elanco scoring system. Two scorers at beginning and end of covariate, every 28 days and at removal from experiment. Average BCS were determined and used for analysis. If BCS was ≥0.5 between scorers, then scorers independently rescored animal.

[0473] Milk composition: Once a week on the trial, a milk sample was collected at each milking during a 24 hour period. Milk samples were collected on the same day(s) of the week. Milk samples were not be composited but were sent to DHIA laboratories in Dubuque, Iowa for analysis of milk fat, protein, lactose, total solids, MUN and somatic cell counts.

[0474] Milk production: Cows were milked daily at approximately 4:00 am and 3:30 μm in a D-12 parallel milking parlor. Daily milk weights were captured by DairyPlan software. A milking system maintenance including calibration of the meters were performed prior to start of trial. Average daily milk and ECM by week and total treatment period was calculated based on milk and milk composition data collected on the trial.

[0475] Feed efficiency: Average daily milk and ECM by week and total treatment period was calculated based on milk and milk composition data collected on the trial. Weekly feed efficiency was calculated as milk/DMI and ECM/DMI.

[0476] Feed sampling: Weekly silage samples were collected and composited monthly. Dry matter determinations was conducted on corn silage and wet forages weekly. TMR was adjusted based on these dry matter determinations. Concentrate mixes, forages, and TMR was sampled weekly, composited by months and analyzed for model profile nutrients by chemical methods at Dairy One Forage Laboratory, Ithaca, N.Y.

[0477] Health and Reproduction: All health (including mastitis) and reproductive events and treatments was recorded throughout the trial and summarized by treatment. Cows were let out once a day for about 2 hours for exercise and estrus observations were captured during this and other times animals moving to parlor and back.

[0478] Rumen Fluid Collection: Rumen fluid was collected from 10 blocks of animals on the experiment. The samples were collected by esophageal tube or rumen canula. For samples collected using an esophageal tube, the first 200-300 mL was discarded to minimize saliva contamination. The pH of the sample was then determined and if the pH was greater than 6.9 than the animal was resampled due to possible saliva contamination.

### Results

[0479] Table 25 below shows a summary of the trial results from cows in control, Treatment 1, and Treatment 2. Overall, cows in Treatment 2 performed better than cows in Treatment 1. Trt, treatment; trt*time, treatment over time; and ECM, energy corrected milk.

TABLE 25
Summary of Trial Results

| | | | | | | P value | |
|---|---|---|---|---|---|---|---|
| | | | | % Difference | | | Trt |
| | Control | Trt 1 | Trt 2 | Trt 1 | Trt 2 | Trt | *Time |
| Milk Yield (lbs) | 77.18 ± 2.09 | 79.99 ± 2.1 | 78.7 ± 1.98 | 3.65 | 1.97 | 0.994 | 0.261 |
| ECM (lbs) | 80.34 ± 5.01 | 81.32 ± 5.1 | 83.51 ± 4.77 | 1.21 | 3.94 | 0.849 | 0.835 |
| Fat (%) | 3.68 ± 0.23 | 3.87 ± 0.23 | 4.0 ± 0.22 | 5.11 | 8.54 | 0.504 | 0.557 |
| Fat (lbs) | 2.8 ± 0.25 | 2.94 ± 0.25 | 3.05 ± 0.24 | 4.82 | 8.67 | 0.507 | 0.863 |
| Protein (%) | 3.31 ± 0.04 | 3.27 ± 0.04 | 3.32 ± 0.03 | −1.35 | 0.31 | 0.976 | 0.649 |
| Protein (lbs) | 2.56 ± 0.14 | 2.46 ± 0.14 | 2.52 ± 0.13 | −4.03 | −1.52 | 0.971 | 0.55 |
| Lactose (%) | 4.73 ± 0.05 | 4.78 ± 0.05 | 4.75 ± 0.05 | 1.08 | 0.47 | 0.709 | 0.641 |
| Lactose (lbs) | 3.73 ± 0.2 | 3.68 ± 0.21 | 3.73 ± 0.19 | −1.34 | −0.04 | 0.879 | 0.583 |

[0480] FIG. 16A shows energy corrected milk in cows administered control, treatment 1, or treatment over time. FIG. 16B shows milk fat in cows administered control, treatment 1, or treatment over time.

### Example 6. Microbial Supplementation in Dairy Cows

[0481] This study examines the effect of microbial supplementation on feed efficiency, milk yield, and milk compositional characteristics.

### Materials and Methods

[0482] Ninety Holstein dairy cows, between 70-114 days in milk were assigned to one of three treatments (n=30 cows/trt; Control, Treatment 1 and Treatment 2). Animals were evaluated for soundness and removed before beginning the trial if they had feet or leg issues, were a three quartered animal or had more than one case of mastitis during calving to beginning of covariate period.

[0483] Treatments were blocked and balanced for parity, days in milk, and current milk yield. Parity was defined as primiparous (no more 30% of animals) or multiparous (2nd or greater). Animals were within a range of 15-20 days in milk within the block. The level of milk production was as tight as possible with the goal being within a range of 10 lbs of milk within a block.

[0484] Cows were adapted to tie-stalls and then a baseline data (covariate) was collected for 2 weeks prior to the start of treatment for all cows. Cows remained on their respective treatment diets for 112 days.

[0485] The treatment groups are shown in Table 26 below. The control group received a total mixed ration without microbial supplementation.

TABLE 26
Treatment Groups

| Group | Microorganisms | Dose | Carrier |
|---|---|---|---|
| Treat- | Clostridium sp. (SEQ ID NO: 28) | 2E6 CFU/g | Calcium |
| ment 1 | Pichia kudriavzevii (SEQ ID NO: 32) | 2E7 CFU/g | carbonate |
| | Ruminococcus bovis (SEQ ID NO: | 2E7 CFU/g | and zeolite |
| | 2108) | | |
| | Butyrivibrio fibrisolvens (SEQ ID | 2E7 CFU/g | |
| | NO: 2067) | | |
| Treat- | Clostridium sp. (SEQ ID NO: 28) | 2E7 CFU/g | Calcium |
| ment 2 | Pichia kudriavzevii (SEQ ID NO: 32) | 2E8 CFU/g | carbonate |
| | Ruminococcus bovis (SEQ ID NO: | 2E7 CFU/g | and zeolite |
| | 2108) | | |
| | Butyrivibrio fibrisolvens (SEQ ID | 2E7 CFU/g | |
| | NO: 2067) | | |
| Control | None | None | Calcium |
| | | | carbonate |
| | | | and zeolite |

[0486] Treatments were packed into a daily packet of approximately 165 g with each packet containing enough product for each cow in the treatment group plus 10% overage. Packets were be stored at 4° C.

[0487] Each day, a fresh packet was opened. 5 g was weighed out for each cow individually and mixed into approximately 150 g of ground corn. Once completed, the packet was resealed and labeled with the date opened before storing at 4° C. Approximately every 50 days, one unused packet was assayed for quality control.

[0488] The basal diet was formulated to meet or exceed dairy NRC nutrient requirements for protein, minerals and vitamins. The basal TMR was formulated based on a 2:1 ratio of corn silage to alfalfa haylage and include 10-20% byproducts, as well as ground corn and protein sources to provide 20% forage NDF, 28-32% total NDF, and 30% starch. The basal TMR was delivered to the barn and CALAN Data Rangers were used to weigh out individual animal feedings. Animals were given all of their daily allotment of food at one feeding. Cows were fed at a reasonably consistent time each day (approximately 9 am). Individual cow dry matter intake (DMI) was adjusted daily to allow for a 10% feed refusal rate. Cow feeding areas were separated by hard plastic dividers in the feed manger between cows to prevent cross contamination of feed and the feed mangers were blocked when cows were being released or being brought back to tie stalls. The test products were hand-fed once daily by top-dressing on each cow's individual TMR diet. Treatments were mixed into the top 3-6 inches of TMR.

[0489] Dry Matter Intakes: Dry matter intakes from −14 to 112 days of treatment (daily/weekly). Diets were offered at ad libitum intake with 10% refusals. Orts were weighed daily and daily intakes calculated for the duration of the study.

[0490] Body Weights: Body weights were collected 3 times per week. The average of body weights collected were used as the body weights for the time periods. Average body weight change was calculated by 28-day periods and overall body weight change based on body weight at end of covariate to end of trial

[0491] Body Condition Score (BCS): BCS scores were determined using the 1-5 Elanco scoring system. Two scorers at beginning and end of covariate, every 28 days and at removal from experiment. Average BCS were determined and used for analysis. If BCS was ≥0.5 between scorers, then scorers independently rescored animal.

[0492] Milk Composition: Once a week on the trial, a milk sample was collected at each milking of a 48-hour period. Milk samples were collected on the same day(s) of the week. Milk samples were not composited but were sent to DHIA laboratories in East Lansing for analysis of milk fat, protein, lactose, solids not fat, total solids, MUN and somatic cell counts.

[0493] Milk Production: Cows were milked daily at approximately 3:00 am and 2:00 μm in a D-7 herringbone milking parlor. Daily milk weights were captured by the Boumatic software. A milking system maintenance including calibration of the meters was performed prior to start of trial. Average daily milk and ECM by week and total treatment period was calculated based on milk and milk composition data collected on the trial.

[0494] Feed Efficiency: Average daily milk and ECM by week and total treatment period was calculated based on milk and milk composition data collected during the trial. Weekly feed efficiency was calculated as milk/DMI, ECM/DMI, and total energy captured as milk and body tissue/DMI.

[0495] Feed Sampling: Weekly silage samples were collected and composited monthly. A NIR nutrient analysis was determined. Dry matter determinations were conducted on corn silage and wet forages twice weekly by Koster tester. TMR may be adjusted based on these dry matter determinations. Samples of all feeds were collected weekly, composited monthly and analyzed by wet chemistry for DM, NDF, starch, CP, lipid, and ash.

[0496] Health and Reproduction; All health (including mastitis) and reproductive events and treatments were recorded throughout the trial and summarized by treatment. Cows were let out once a day for about 2 hours for exercise and estrus observations are captured during this and other times animals moving to parlor and back.

[0497] Other Measurements: Total tract digestibility of dry matter, neutral detergent fiber, starch, protein, and lipid was determined on 20 cows from each treatment group at approximately 30 to 50 days on treatment. A total of 8 samples for each cow was collected over 5 consecutive days. During the sampling period, blood glucose, insulin, and non-esterified fatty acids were collected and also on one other day at −1, +2 and +6 h of feeding time as metabolic indicators.

[0498] Rumen samples were collected via oro-ruminal sampling on 12 cows per treatment group during pretreatment, approximately 50-60 days on treatment and 90-100 days on treatment.

### Results

[0499] Table 27 below shows a summary of the trial results from cows in control, Treatment 1, and Treatment 2. Overall, cows in Treatment 2 performed better than cows in Treatment 1. Trt, treatment; and ECM, energy corrected milk.

TABLE 27
Summary of Trial Results

| | | | | | | P value | |
|---|---|---|---|---|---|---|---|
| | | | | % Difference | | | Trt |
| | Control | Trt 1 | Trt 2 | Trt 1 | Trt 2 | Trt | *Time |
| Milk Yield (lbs) | 86.54 ± 1.97 | 85.8 ± 1.98 | 91.09 ± 2.0 | −0.85 | 5.26 | 0.859 | 0.005 |
| ECM (lbs) | 90.77 ± 2.62 | 91.79 ± 2.63 | 97.31 ± 2.78 | 1.13 | 7.21 | 0.899 | 0.12 |
| Fat (%) | 3.95 ± 0.09 | 3.76 ± 0.1 | 3.85 ± 0.09 | −4.75 | −2.68 | 0.054 | 0.131 |
| Fat (lbs) | 3.36 ± 0.1 | 3.32 ± 0.11 | 3.51 ± 0.11 | 4.3 | 4.24 | 0.751 | 0.267 |
| Protein (%) | 3.16 ± 0.04 | 3.18 ± 0.05 | 3.25 ± 0.04 | 0.58 | 3 | 0.217 | 0.36 |
| Protein (lbs) | 2.69 ± 0.09 | 2.79 ± 0.09 | 2.97 ± 0.1 | 4.03 | 10.66 | 0.404 | 0.066 |
| Lactose (%) | 4.97 ± 0.02 | 4.99 ± 0.02 | 4.98 ± 0.02 | 0.32 | 0.08 | 0.068 | 0.233 |
| Lactose (lbs) | 4.21 ± 0.13 | 4.4 ± 0.13 | 4.62 ± 0.13 | 4.38 | 9.53 | 0.716 | 0.067 |
| DMI (lbs) | 76.59 ± 1.85 | 75.83 ± 1.85 | 77.97 ± 1.87 | −0.99 | 1.81 | 0.364 | 0.696 |
| FE (ECM:DMI) | 1.14 ± 0.03 | 1.15 ± 0.03 | 1.19 ± 0.04 | 0.81 | 4.41 | 0.213 | 0.111 |
| Body weight (kg) | 1414.01 ± 8.74 | 1419.59 ± 8.87 | 1416.04 ± 8.93 | 0.39 | 0.14 | <0.001 | 0.924 |

[0500] FIG. 17A shows milk yield in cows administered control, treatment 1, or treatment over time. FIG. 17B shows energy corrected milk in cows administered control, treatment 1, or treatment over time.

### INCORPORATION BY REFERENCE

[0501] All references, articles, publications, patents, patent publications, and patent applications cited herein are incorporated by reference in their entireties for all purposes, including PCT Application Nos. PCT/US2017/012573 and PCT/US2020/020311.

[0502] However, mention of any reference, article, publication, patent, patent publication, and patent application cited herein is not, and should not be taken as, an acknowledgment or any form of suggestion that they constitute valid prior art or form part of the common general knowledge in any country in the world.

### NUMBERED EMBODIMENTS

[0503] Other subject matter contemplated by the present disclosure is set out in the following numbered embodiments:

Embodiment 1. An orally deliverable composition for increasing milk production or improving milk compositional characteristics in a ruminant, comprising:
[0504] a) Ruminococcus bois comprising a 16S nucleic acid sequence of SEQ ID NO: 2108; and
[0505] b) a carrier suitable for oral ruminant administration.
   Embodiment 2. The composition of embodiment 1, wherein the Ruminococcus bovis is deposited as PTA-125917, NRRL B-67764, TSD-225, or NCTC 14479.
   Embodiment 3. The composition of embodiment 1 or 2, wherein the composition comprises:
[0506] a) one or more bacteria comprising a 16S nucleic acid sequence sharing at least about 97%, 98%, 99%, or 100% sequence identity to any one of SEQ ID NOs: 1-30 and 2045-2103; and/or
[0507] b) one or more fungi comprising an ITS nucleic acid sequence sharing at least about 97%, 98%, 99%, or 100% sequence identity to any one of SEQ ID NOs: 31-60 and 2104-2107.
   Embodiment 4. The composition of any one of embodiments 1-3, wherein the composition comprises:
[0508] a) a Clostridium sp. comprising a 16S nucleic acid sequence sharing at least about 97%, 98%, 99%, or 100% sequence identity to SEQ ID NO: 28;
[0509] b) a Pichia sp. comprising an ITS nucleic acid sequence sharing at least about 97%, 98%, 99%, or 100% sequence identity to SEQ ID NO: 32; and/or
[0510] c) a Butyrivibrio sp. comprising a 16S nucleic acid sequence sharing at least about 97%, 98%, 99%, or 100% sequence identity to SEQ ID NO: 2067.
   Embodiment 5. The composition of embodiment 4, wherein the composition comprises:
[0511] a) a Clostridium sp. with a deposit accession number of NRRL B-67248;
[0512] b) a Pichia sp. with a deposit accession number of NRRL Y-67249; and/or
[0513] c) a Butyrivibrio sp. with a deposit accession number of NRRL B-67347.
   Embodiment 6. The composition of any one of embodiments 1-5, wherein the Ruminococcus bovis comprises one or more mutations in the whole genome following serial preservation.
   Embodiment 7. The composition of embodiment 6, wherein the one or more mutations are selected from the group consisting of:
[0514] a) a G→T substitution at position 297 of SEQ ID NO; 2109;
[0515] b) a CC→TA substitution at positions 301-302 of SEQ ID NO: 2111;
[0516] c) a T→G substitution at position 307 of SEQ ID NO; 2111;
[0517] d) a −A deletion at position 300 of SEQ ID NO: 2113;
[0518] e) a CCA→TTC substitution at positions 116-118 of SEQ ID NO: 2115;
[0519] f) a +T insertion between positions 105-106 of SEQ ID NO: 2117;
[0520] g) a C→T substitution at position 298 of SEQ ID NO: 2119;
[0521] h) a C→A substitution at position 298 of SEQ ID NO: 2121; and
[0522] i) a +AC insertion between positions 43-44 of SEQ ID NO: 2123.
   Embodiment 8. An orally deliverable composition for increasing milk production or improving milk compositional characteristics in a ruminant, comprising:
[0523] a) Ruminococcus bovis comprising one or more mutations selected from the group consisting of:
   [0524] i) a G→T substitution at position 297 of SEQ ID NO: 2109;
   [0525] ii) a CC→TA substitution at positions 301-302 of SEQ ID NO: 2111;
   [0526] iii) a T→G substitution at position 307 of SEQ ID NO: 2111;
   [0527] iv) a −A deletion at position 300 of SEQ ID NO: 2113;
   [0528] v) a CCA→TTC substitution at positions 116-118 of SEQ ID NO: 2115;
   [0529] vi) a +T insertion between positions 105-106 of SEQ ID NO: 2117;
   [0530] vii) a C→T substitution at position 298 of SEQ ID NO: 2119;
   [0531] viii) a C→A substitution at position 298 of SEQ ID NO: 2121; and
   [0532] ix) a +AC insertion between positions 43-44 of SEQ ID NO: 2123; and
[0533] b) a carrier suitable for oral ruminant administration.
   Embodiment 9. The composition of embodiment 8, wherein the composition comprises.
[0534] a) one or more bacteria comprising a 16S nucleic acid sequence sharing at least about 97%, 98%, 99%, or 100% sequence identity to any one of SEQ ID NOs: 1-30 and 2045-2103; and/or
[0535] b) one or more fungi comprising an ITS nucleic acid sequence sharing at least about 97%, 98%, 99%, or 100% sequence identity to any one of SEQ ID NOs: 31-60 and 2104-2107.
   Embodiment 10. The composition of embodiment 9, wherein the composition comprises:
[0536] a) a Clostridium sp. comprising a 16S nucleic acid sequence sharing at least about 97%, 98%, 99%, or 100% sequence identity to SEQ ID NO: 28;
[0537] b) a Pichia sp. comprising an ITS nucleic acid sequence sharing at least about 97%, 98%, 990%, or 100% sequence identity to SEQ ID NO: 32; and/or
[0538] c) a Butyrivibrio sp. comprising a 16S nucleic acid sequence sharing at least about 97%, 98%, 99%, or 100% sequence identity to SEQ ID NO: 2067.
   Embodiment 11. The composition of embodiment 10, wherein the composition comprises:
[0539] a) a Clostridium sp. with a deposit accession number of NRRL B-67248;
[0540] b) a Pichia sp. with a deposit accession number of NRRL Y-67249; and/or
[0541] c) a Butyrivibrio sp. with a deposit accession number of NRRL B-67347.
   Embodiment 12. An orally deliverable composition for increasing milk production or improving milk compositional characteristics in a ruminant, comprising:
[0542] a) Ruminococcus bovis comprising a nucleic acid sequence selected from any one of SEQ ID NOs: 2110, 2112, 2114, 2116, 2118, 2120, 2122, or 2124; and
[0543] b) a carrier suitable for oral ruminant administration.
   Embodiment 13. The composition of embodiment 12, wherein the composition comprises:
[0544] a) one or more bacteria comprising a 16S nucleic acid sequence sharing at least about 97%, 98%, 99%, or 100% sequence identity to any one of SEQ ID NOs: 1-30 and 2045-2103; and/or
[0545] b) one or more fungi comprising an ITS nucleic acid sequence sharing at least about 97%, 98%, 99%, or 100% sequence identity to any one of SEQ ID NOs: 31-60 and 2104-2107.
   Embodiment 14. The composition of embodiment 13, wherein the composition comprises:
[0546] a) a Clostridium sp. comprising a 16S nucleic acid sequence sharing at least about 97%, 98%, 99%, or 100% sequence identity to SEQ ID NO: 28;
[0547] b) a Pichia sp. comprising an ITS nucleic acid sequence sharing at least about 97%, 98%, 99%, or 100% sequence identity to SEQ ID NO: 32; and/or
[0548] c) a Butyrivibrio sp. comprising a 16S nucleic acid sequence sharing at least about 97%, 98%, 99%, or 100% sequence identity to SEQ ID NO: 2067.
   Embodiment 15. The composition of embodiment 14, wherein the composition comprises:
[0549] a) a Clostridium sp. with a deposit accession number of NRRL B-67248;
[0550] b) a Pichia sp. with a deposit accession number of NRRL Y-67249; and/or
[0551] c) a Butyrivibrio sp. with a deposit accession number of NRRL B-67347.
   Embodiment 16. An orally deliverable composition for increasing milk production or improving milk compositional characteristics in a ruminant, comprising:
[0552] a) a Ruminococcus bovis with a deposit accession number PTA-125917, NRRL B-67764, TSD-225, or NCTC 14479; and
[0553] b) a carrier suitable for oral ruminant administration.
   Embodiment 17. The composition of embodiment 16, wherein the composition comprises:
[0554] a) one or more bacteria comprising a 16S nucleic acid sequence sharing at least about 97%, 98%, 99%, or 100% sequence identity to any one of SEQ ID NOs: 1-30 and 2045-2103; and/or
[0555] b) one or more fungi comprising an ITS nucleic acid sequence sharing at least about 97%, 98%, 99%, or 100% sequence identity to any one of SEQ ID NOs: 31-60 and 2104-2107.
   Embodiment 18. The composition of embodiment 17, wherein the composition comprises:
[0556] a) a Clostridium sp. comprising a 16S nucleic acid sequence sharing at least about 97%, 98%, 99%, or 100% sequence identity to SEQ ID NO: 28;
[0557] b) a Pichia sp. comprising an ITS nucleic acid sequence sharing at least about 97%, 98%, 99%, or 100% sequence identity to SEQ ID NO: 32; and/or
[0558] c) a Butyrivibrio sp. comprising a 16S nucleic acid sequence sharing at least about 97%, 98%, 99%, or 100% sequence identity to SEQ ID NO: 2067.
   Embodiment 19. The composition of embodiment 18, wherein the composition comprises:
[0559] a) a Clostridium sp. with a deposit accession number of NRRL B-67248;
[0560] b) a Pichia sp. with a deposit accession number of NRRL Y-67249; and/or
[0561] c) a Butyrivibrio sp. with a deposit accession number of NRRL B-67347.
   Embodiment 20. An orally deliverable composition for increasing milk production or improving milk compositional characteristics in a ruminant, comprising:
[0562] a) Ruminococcus bovis; and
[0563] b) a carrier suitable for oral ruminant administration.
   Embodiment 21. The composition of embodiment 20, wherein the composition comprises:
[0564] a) one or more bacteria comprising a 16S nucleic acid sequence sharing at least about 97%, 98%, 99%, or 100% sequence identity to any one of SEQ ID NOs: 1-30 and 2045-2103; and/or
[0565] b) one or more fungi comprising an ITS nucleic acid sequence sharing at least about 97%, 98%, 99%, or 100% sequence identity to any one of SEQ ID NOs: 31-60 and 2104-2107.
   Embodiment 22. The composition of embodiment 21, wherein the composition comprises:
[0566] a) a Clostridium sp. comprising a 16S nucleic acid sequence sharing at least about 97%, 98%, 99%, or 100% sequence identity to SEQ ID NO: 28;
[0567] b) a Pichia sp. comprising an ITS nucleic acid sequence sharing at least about 97%, 98%, 99%, or 100% sequence identity to SEQ ID NO: 32; and/or
[0568] c) a Butyrivibrio sp. comprising a 16S nucleic acid sequence sharing at least about 97%, 98%, 99%, or 100% sequence identity to SEQ ID NO: 2067.
   Embodiment 23. The composition of embodiment 22, wherein the composition comprises:
[0569] a) a Clostridium sp. with a deposit accession number of NRRL B-67248;
[0570] b) a Pichia sp. with a deposit accession number of NRRL Y-67249; and/or
[0571] c) a Butyrivibrio sp. with a deposit accession number of NRRL B-67347.
   Embodiment 24. A composition, comprising:
[0572] a) Ruminococcus bovis comprising a 16S nucleic acid sequence of SEQ ID NO: 2108; and
[0573] b) a carrier suitable for oral ruminant administration.
   Embodiment 25. A composition, comprising:
[0574] a) Ruminococcus bovis comprising one or more mutations selected from the group consisting of:
   [0575] i) a G→T substitution at position 297 of SEQ ID NO: 2109;
   [0576] ii) a CC→TA substitution at positions 301-302 of SEQ ID NO: 2111;
   [0577] iii) a T→G substitution at position 307 of SEQ ID NO: 2111;
   [0578] iv) a −A deletion at position 300 of SEQ ID NO: 2113;
   [0579] v) a CCA→TTC substitution at positions 116-118 of SEQ ID NO: 2115;
   [0580] vi) a +T insertion between positions 105-106 of SEQ ID NO: 2117;
   [0581] vii) a C→T substitution at position 298 of SEQ ID NO: 2119;
   [0582] viii) a C→A substitution at position 298 of SEQ ID NO: 2121; and
   [0583] ix) a +AC insertion between positions 43-44 of SEQ ID NO: 2123; and
[0584] b) a carrier suitable for oral ruminant administration.
   Embodiment 26. A composition, comprising:
[0585] a) Ruminococcus bovis comprising a nucleic acid sequence selected from any one of SEQ ID NOs: 2110, 2112, 2114, 2116, 2118, 2120, 2122, or 2124; and
[0586] b) a carrier suitable for oral ruminant administration.
   Embodiment 27. A composition, comprising:
[0587] a) a Ruminococcus bovis with the deposit accession number PTA-125917, NRRL B-67764, TSD-225, or NCTC 14479; and
[0588] b) a carrier suitable for oral ruminant administration.
   Embodiment 28. A composition, comprising:
[0589] a) Ruminococcus bovis; and
[0590] b) a carrier suitable for ruminant administration.
   Embodiment 29. The composition of any one of embodiments 1-28, wherein the composition is formulated to protect the bacteria and/or fungi from external stressors prior to entering the gastrointestinal tract of the ruminant.
   Embodiment 30. The composition of any one of embodiments 1-28, wherein the ruminant is a cow.
   Embodiment 31. The composition of any one of embodiments 1-28, wherein a ruminant administered the composition exhibits an increase in milk production that leads to an increase in milk yield or an increase in energy-corrected milk.
   Embodiment 32. The composition of any one of embodiments 1-28, wherein a ruminant administered the composition exhibits an improved milk compositional characteristic selected from the group consisting of: an increase in milk fat(s), an increase in milk protein(s), an increase of carbohydrates in milk, an increase of vitamins in milk, an increase of minerals in milk, or combinations thereof.
   Embodiment 33. The composition of any one of embodiments 1-28, wherein a ruminant administered the composition exhibits at least one improved phenotypic trait, selected from the group consisting of: an improved efficiency in feed utilization, improved digestibility, an increase in polysaccharide and lignin degradation, an increase in fatty acid concentration in the rumen, pH balance in the rumen, a reduction in methane emissions, a reduction in manure production, improved dry matter intake, an improved efficiency of nitrogen utilization, or combinations thereof.
   Embodiment 34. The composition of any one of embodiments 1-28, wherein the composition is formulated to protect the bacteria and/or fungi from oxidative stress.
   Embodiment 35. The composition of any one of embodiments 1-28, wherein the composition is formulated to protect the bacteria and/or fungi from moisture.
   Embodiment 36. The composition of any one of embodiments 1-28, wherein the composition is dry.
   Embodiment 37. The composition of any one of embodiments 1-28, wherein the composition is combined with food.
   Embodiment 38. The composition of any one of embodiments 1-28, wherein the composition is combined with cereal, starch, oilseed cake, or vegetable waste.
   Embodiment 39. The composition of any one of embodiments 1-28, wherein the composition is combined with hay, haylage, silage, livestock feed, forage, fodder, beans, grains, micro-ingredients, fermentation compositions, mixed ration, total mixed ration, or a mixture thereof.
   Embodiment 40. The composition of any one of embodiments 1-28, wherein the composition is formulated as a solid, liquid, or mixture thereof.
   Embodiment 41. The composition of any one of embodiments 1-28, wherein the composition is formulated as a pellet, capsule, granulate, or powder.
   Embodiment 42. The composition of any one of embodiments 1-28, wherein the composition is combined with water, medicine, vaccine, or a mixture thereof.
   Embodiment 43. The composition of any one of embodiments 1-28, wherein the composition is encapsulated.
   Embodiment 44. The composition of embodiment 43, wherein the composition is encapsulated in a polymer or carbohydrate.
   Embodiment 45. The composition of any one of embodiments 1-44, wherein the bacteria and/or fungi is present in the composition in an amount of at least 10² cells.
   Embodiment 46. A method for increasing milk production or improving milk compositional characteristics in a ruminant, the method comprising orally administering to a ruminant an effective amount of the composition from any one of embodiments 1-45.
   Embodiment 47. A method for increasing milk production or improving milk compositional characteristics in a ruminant, the method comprising orally administering to a ruminant an effective amount of a ruminant supplement comprising:
[0591] a) Ruminococcus bovis; and
[0592] b) a carrier suitable for oral ruminant administration.
   Embodiment 48. A method for increasing milk production or improving milk compositional characteristics in a ruminant, the method comprising orally administering to a ruminant an effective amount of a ruminant supplement comprising:
[0593] a) Ruminococcus bovis comprising a 16S nucleic acid sequence of SEQ ID NO: 2108; and
[0594] b) a carrier suitable for oral ruminant administration.
   Embodiment 49. A method for increasing milk production or improving milk compositional characteristics in a ruminant, the method comprising orally administering to a ruminant an effective amount of a ruminant supplement comprising:
[0595] a) a Ruminococcus bovis with the deposit accession number PTA-125917, NRRL B-67764, TSD-225, or NCTC 14479; and
[0596] b) a carrier suitable for oral ruminant administration.
   Embodiment 50. A method for increasing milk production or improving milk compositional characteristics in a ruminant, the method comprising orally administering to a ruminant an effective amount of a ruminant supplement comprising:
[0597] a) Ruminococcus bovis comprising one or more mutations selected from the group consisting of;
   [0598] i) a G→T substitution at position 297 of SEQ ID NO: 2109;
   [0599] ii) a CC→TA substitution at positions 301-302 of SEQ ID NO: 2111;
   [0600] iii) a T→G substitution at position 307 of SEQ ID NO: 2111;
   [0601] iv) a −A deletion at position 300 of SEQ ID NO: 2113;
   [0602] v) a CCA→TTC substitution at positions 116-118 of SEQ ID NO: 2115,
   [0603] vi) a +T insertion between positions 105-106 of SEQ ID NO: 2117;
   [0604] vii) a C→T substitution at position 298 of SEQ ID NO: 2119;
   [0605] viii) a C→A substitution at position 298 of SEQ ID NO: 2121; and
   [0606] ix) a +AC insertion between positions 43-44 of SEQ ID NO: 2123; and
[0607] b) a carrier suitable for oral ruminant administration.
   Embodiment 51. The method according to any one of embodiments 46-50, wherein the ruminant administered the effective amount of the ruminant supplement exhibits an increase in milk production that leads to a measured increase in milk yield.
   Embodiment 52. The method according to any one of embodiments 46-50, wherein the ruminant administered the effective amount of the ruminant supplement exhibits an increase in milk production and improved milk compositional characteristics that leads to a measured increase in energy-corrected milk.
   Embodiment 53. The method according to any one of embodiments 46-50, wherein the ruminant administered the effective amount of the ruminant supplement exhibits an improved milk compositional characteristic selected from the group consisting of: an increase in milk fat(s), an increase in milk protein(s), an increase of carbohydrates in milk, an increase of vitamins in milk, an increase of minerals in milk, or combinations thereof.
   Embodiment 54. The method according to any one of embodiments 46-50, wherein the ruminant administered the effective amount of the ruminant supplement exhibits at least a 1% increase in the average production of: milk fat(s), milk protein(s), energy-corrected milk, or combinations thereof.
   Embodiment 55. The method according to any one of embodiments 46-50, wherein the ruminant administered the effective amount of the ruminant supplement exhibits at least a 100/% increase in the average production of: milk fat(s), milk protein(s), energy-corrected milk, or combinations thereof.
   Embodiment 56. The method according to any one of embodiments 46-50, wherein the ruminant administered the effective amount of the ruminant supplement exhibits at least a 20% increase in the average production of: milk fat(s), milk protein(s), energy-corrected milk, or combinations thereof.
   Embodiment 57. The method according to any one of embodiments 46-50, wherein the ruminant administered the effective amount of the ruminant supplement, further exhibits at least one improved phenotypic trait, selected from the group consisting of: an improved efficiency in feed utilization, improved digestibility, an increase in polysaccharide and lignin degradation, an increase in fatty acid concentration in the rumen, pH balance in the rumen, a reduction in methane emissions, a reduction in manure production, improved dry matter intake, an improved efficiency of nitrogen utilization, or combinations thereof.
   Embodiment 58. The method according to any one of embodiments 46-50, wherein the ruminant administered the effective amount of the ruminant supplement, further exhibits a shift in the microbiome of the rumen.
   Embodiment 59. The method according to any one of embodiments 46-50, wherein the ruminant administered the effective amount of the ruminant supplement, further exhibits a shift in the microbiome of the rumen, wherein a population of microbes present in the rumen before administration of the ruminant supplement increase in abundance after administration of the ruminant supplement.
   Embodiment 60. The method according to any one of embodiments 46-50, wherein the ruminant administered the effective amount of the ruminant supplement, further exhibits: a shift in the microbiome of the rumen, wherein a population of microbes present in the rumen before administration of the ruminant supplement decrease in abundance after administration of the ruminant supplement.
   Embodiment 61. The method according to any one of embodiments 46-50, wherein the ruminant administered the effective amount of the ruminant supplement, further exhibits: a shift in the microbiome of the rumen,

[0608] wherein a first population of microbes present in the rumen before administration of the ruminant supplement increase in abundance after administration of the ruminant supplement, and

[0609] wherein a second population of microbes present in the rumen before administration of the ruminant supplement decrease in abundance after administration of the ruminant supplement.

Embodiment 62. A composition comprising:
[0610] a) a Ruminococcus bovis with a deposit accession number of PTA-125917, NRRL B-67764, TSD-225 or NCTC 14479;
[0611] b) a Clostridium sp. with a deposit accession number of NRRL B-67248;
[0612] c) a Pichia sp. with a deposit accession number of NRRL Y-67249; and/or
[0613] d) a Butyrivibrio sp. with a deposit accession number of NRRL B-67347.
   Embodiment 63. A composition that performs the same or better than recombinant bovine growth hormone for increasing milk production or improving milk compositional characteristics in a ruminant, wherein the composition comprises:
[0614] a) a Ruminococcus bovis; and
[0615] b) a carrier suitable for ruminant administration.
   Embodiment 64. A composition that performs the same or better than recombinant bovine growth hormone for increasing milk production or improving milk compositional characteristics in a ruminant, wherein the composition comprises:
[0616] a) Ruminococcus bovis comprising a 16S nucleic acid sequence of SEQ ID NO: 2108; and
[0617] b) a carrier suitable for ruminant administration.
   Embodiment 65. The composition of embodiment 63 or 64, wherein the composition comprises:
[0618] a) one or more bacteria comprising a 16S nucleic acid sequence sharing at least about 97%, 98%, 99%, or 100% sequence identity to any one of SEQ ID NOs: 1-30 and 2045-2103; and/or
[0619] b) one or more fungi comprising an ITS nucleic acid sequence sharing at least about 97%, 98%, 99%, or 100% sequence identity to any one of SEQ ID NOs: 31-60 and 2104-2107.
   Embodiment 66. The composition of embodiment 65, wherein the composition comprises:
[0620] a) a Clostridium sp. comprising a 16S nucleic acid sequence sharing at least about 97%, 98%, 99%, or 100% sequence identity to SEQ ID NO: 28;
[0621] b) a Pichia sp. comprising an ITS nucleic acid sequence sharing at least about 97%, 98%, 99%, or 100% sequence identity to SEQ ID NO: 32; and/or
[0622] c) a Butyrivibrio sp. comprising a 16S nucleic acid sequence sharing at least about 97%, 98%, 99%, or 100% sequence identity to SEQ ID NO: 2067.
   Embodiment 67. The composition of embodiment 66, wherein the composition comprises:
[0623] a) a Clostridium sp. with a deposit accession number of NRRL B-67248;
[0624] b) a Pichia sp. with a deposit accession number of NRRL Y-67249; and/or
[0625] c) a Butyrivibrio sp. with a deposit accession number of NRRL B-67347.

The application's sequence listing, which the Patent Office published only in electronic form, follows.

SEQUENCE LISTING (2124 sequences)

SEQ ID NO: 1 - DNA, 225 bp, Unknown
  Encodes 16S rRNA from Ruminococcus bovis sp. nov.
agagtttgatcctggctcaggatgaacgctggcggcgtgcctaacacatgcaagtcgaacggaacttctttgacagaattcttcggaaggaagttgattaagtttagtggcggacgggtgagtaacgcgtgagtaacctgcctttgagaggggaataacttcccgaaagggatgctaataccgcataaagcatagaagtcgcatggcttttatgccaaagattta

SEQ ID NO: 2 - DNA, 225 bp, Unknown
  Encodes 16S rRNA from Ruminococcus
agagtttgatcatggctcaggacgaacgctggcggcgtgcctaacacatgcaagtcgaacggaactattttgactgattccttcgggatgaagaatttttagtttagtggcggacgggtgagtaacgcgtgagtaacctgcctctgagaggggaataacgttctgaaaagaacgctaataccgcataacacatatttgccgcatgacagatatgtcaaagatttt

SEQ ID NO: 3 - DNA, 225 bp, Unknown
  Encodes 16S rRNA from Clostridium
agagtttgatcatggctcaggatgaacgctggcggcgtgcctaacacatgcaagtcgaacgaagctcgatcctcggagatttcggtcaaagaggaaagatgacttagtggcggacgggtgagtaatgcgtgagcaacctgccttggagtgggggacaacagttggaaacgactgctaataccgcataatgtatttggggggcatcctctgaataccaaagattta

SEQ ID NO: 4 - DNA, 225 bp, Unknown
  Encodes 16S rRNA from Roseburia
agagtttgatcctggctcaggatgaacgctggcggcgtgcttaacacatgcaagtcgaacgaggttcctatttacgatcccttcggggtgacgagtttgaaccgagtggcggacgggtgagtaacgcgtggggaacctgcctcatgccgggggataccagagggaaacttctgttaataccgcataagcgcacggtgtggcatcacacagtgtgaaaaactccgg

SEQ ID NO: 5 - DNA, 225 bp, Unknown
  Encodes 16S rRNA from Hydrogenoanaerobacterium
agagtttgatcatggctcaggacgaacgctggcggcgtgcctaacacatgcaagtcgaacgaagcatttggagctgatctcttcggagtgacgcaccttatgacttagtggcggacgggtgagtaacacgtgagcaacctgcctttcagagtggaataacagttggaaacggctgctaataccgcataacgtcatagtaccgcatgataccttgaccaaagattt

SEQ ID NO: 6 - DNA, 225 bp, Unknown
  Encodes 16S rRNA from Clostridium
agagtttgatcatggctcaggatgaacgctggcggcgtgcctaacacatgcaagttgaacgaagcaatcaagacagaatccttcgggaggaagatttgattgactgagtggcggacgggtgagtaacgcgtgggtaacctgccttgtacagggggataacagttagaaatgactgctaataccgcataagcgcacagtactgcatggtacagtgtgaaaaactcc

SEQ ID NO: 7 - DNA, 225 bp, Unknown
  Encodes 16S rRNA from Saccharofermentans
agagtttgatcatggctcaggatgaacgctggcggcgtgcctaacacatgcaagtcgaacggagttacgagagcttgcttttgtaacttagtggcggacgggtgagtaatgtatgagcaacctgcctttcagagggggacaacagttggaaacgactgctaataccgcataatgtatttgggtggcatcacctggataccaaaggagcaatccgctgaaagatgg

SEQ ID NO: 8 - DNA, 225 bp, Unknown
  Encodes 16S rRNA from Saccharofermentans
agagtttgatcatggctcaggatgaacgctggcggcgtgcttaacacatgcaagtcgaacggggtttaagaaggaagcttgctttcattttaaacctagtggcggacgggtgagtaacgcgtgaggaacctgcccttcagtggggaacaacaactagaaatggttgctaataccgcataatgtcggagagccgcatgacattccgaccaaaggatttattcgctg

SEQ ID NO: 9 - DNA, 225 bp, Unknown
  Encodes 16S rRNA from Butyricicoccus
agagtttgatcatggctcaggacgaacgctggcggcatgcctaacacatgcaagtcgaacggagatattgagagcttgcttttgatatcttagtggcggacgggtgagtaacgcgtgagcaacctgcctttcagtggggaataatacttcgaaagaggtactaataccgcataacgtattgagatcgcatggttttgataccaaagatttatcgctgagagatgg

SEQ ID NO: 10 - DNA, 225 bp, Unknown
  Encodes 16S rRNA from Papillibacter
agagtttgatcatggctcaggatgaacgctggcggcgtgcctaacacatgcaagtcgaacgaagcactttggatggagattcgtcaaaatctgatttgacttagtggcggacgggtgagtaatgtgtgagcaacctgcctttcagagggggacaacagttggaaacggctgctaataccgcataatgtatattgagggcatcctcgatataccaaaggagcaatc

SEQ ID NO: 11 - DNA, 225 bp, Unknown
  Encodes 16S rRNA from Ruminococcus
agagtttgatcatggctcaggacgaacgctggcggcgtgcctaacacatgcaagtcgaacggagttgaggagcttgctccttaacttagtggcggacgggtgagtaacgcgtgagtaacctgcctctgagaggggaataacgttctgaaaagaacgctaataccgcatgacacatatttgccgcatgacagatatgtcaaagattttatcgctcagagatggact

SEQ ID NO: 12 - DNA, 225 bp, Unknown
  Encodes 16S rRNA from Hydrogenoanaerobacterium
agagtttgatcatggctcaggacgaacgctggcggcacgcttaacacatgcaagtcgaacggagtttagagagcttgctttttaaacttagtggcggacgggtgagtaacacgtgagcaacctgccttcaagcgaggaataatgagtggaaacgctctgtaatacctcataacgtatttttaccgcatgataggaataccaaagatttatcacttgaagatgggc

SEQ ID NO: 13 - DNA, 225 bp, Unknown
  Encodes 16S rRNA from Pelotomaculum
agagtttgatcatggctcaggacgaacgctggcggcgtgcctaacacatgcaagtcgaacggagtaagaatttcggtttttacttagtggcgaacgggtgagtaacgcgtgaacaacctgccttcctgagggggataacacctggaaacaagtgctaataccgcataagaccacatgtccgcatggacgaggggtcaaaggagcaatccgcagggagaggggttc

SEQ ID NO: 14 - DNA, 225 bp, Unknown
  Encodes 16S rRNA from Saccharofermentans
agagtttgatcatggctcaggatgaacgctggcggcgtgcctaacacatgcaagtcgagcggagttatgagaggtgcttgcaccacttttaacttagcggcggacgggtgagtaacacgtgagtaacctgcccttgagtggggaacaacatcgagaaatcggtgctaataccgcataatatctctttgccgcatgacagagagatcaaaggatttattcgcttga

SEQ ID NO: 15 - DNA, 225 bp, Unknown
  Encodes 16S rRNA from Lachnospiraceae incertae sedis
agagtttgatcatggctcaggatgaacgctggcggcgtgcttaacacatgcaagtcgaacggagttatcaatgaaacctagtgatttgataacttagtggcggacgggtgagtaacgcgtgggtaacctgccttatccggggggataacagttagaaatgactgctaataccgcataagcgcacagaatcgcatgattccgtgtgaaaagatttatcgggataag

SEQ ID NO: 16 - DNA, 225 bp, Unknown
  Encodes 16S rRNA of Butyricicoccus - sensu stricto
agagtttgatcatggctcaggacgaacgctggcggcatgcctaacacatgcaagtcgaacggagtttaaggggcttgctccttaaacttagtggcggacgggtgagtaacgcgtgagcaacctgcctctcagtggggaataatgtactgaaaaggacactaataccgcatgacgtaccggagtcgcatggcactggtaccaaagatttatcgctgagagatgggc

SEQ ID NO: 17 - DNA, 225 bp, Unknown
  Encodes 16S rRNA from Lachnospiraceae incertae sedis
agagtttgatcatggctcaggatgaacgctggcggcgtgcttaacacatgcaagtcgaacggagtttagatgaaagcttgcttttgactaaacttagtggcggacgggtgagtaacgcgtgggtaacctgccttataccgggggacaacagttggaaacggctgctaataccgcataagcgcacgaggaggcatctcctagtgtgaaaaactccggtggtataag

SEQ ID NO: 18 - DNA, 225 bp, Unknown
  Encodes 16S rRNA from Anaeroplasma
agagtttgatcatggctcaggattaacgctggcggcgtgcctaatacatgcaagtcgaatggtagcaataccatggcgaacgggtgagtaacacgtaggtaacctgtctttaagacgaggataaccgttggaaacgacggataatactcgataggtgattttagggcatcctagaatcattaaagatttatcacttagagaggggcctgcggcgcattagctaga

SEQ ID NO: 19 - DNA, 225 bp, Unknown
  Encodes 16S rRNA from Clostridium sensu stricto
agagtttgatcatggctcaggacgaacgctggcggcgtgcctaacacatgcaagtcgagcggggacattgcgacggagacgaagtactcgtacggagtcaaagatgtaatgttctagcggcggacgggtgagtaacgcgtgagcaacctgtcccttacagggggataacacagcgaaagttgtactaataccgcatgagaccacaggatgacatcatccaggggt

SEQ ID NO: 20 - DNA, 225 bp, Unknown
  Encodes 16S rRNA from Butyricicoccus
agagtttgatcatggctcaggataaacgctggcggcgcacataagacatgcaagtcgaacggacttaaccgttagtttactaatggagcggttagtggcggactggtgagtaacgcgtaagcaatctgcctgttagagggggataacagtgagaaatcactgctaataccgcatatgctgtgaacatcacatgatgtaaacaggaaaggagcaatccgctaatag

SEQ ID NO: 21 - DNA, 225 bp, Unknown
  Encodes 16S rRNA from Butyricicoccus
agagtttgatcatggctcaggataaacgctggcggcgcacataagacatgcaagtcgaacgaacttaatcttttagtttactattagaagcggttagtggcggactggtgagtaacgcgtaaacaatctgcctatcagaggggaacaacagtgagaaatcactgctaataccgcatatgctgtgagtacggcatcgtacaaacaggaaaggagcaatccgctgat

SEQ ID NO: 22 - DNA, 225 bp, Unknown
  Encodes 16S rRNA from Rikenella
agagtttgatcatggctcaggatgaacgctagcggcaggcttaacacatgcaagtcgaggggcagcaggcggtagcaataccgtgctggcgaccggcgcacgggtgcgtaacgcgtatgcaacctacccactacagggggataacggagggaaacttccactaatatcccatggagttgttttttcgcatggagagacaactaaagctacggtggtagtggatgg

SEQ ID NO: 23 - DNA, 225 bp, Unknown
  Encodes 16S rRNA from Tannerella
agagtttgatcatggctcaggatgaacgctagcggcaggcttaacacatgcaagtcgaggggcagcggggtgtagcaatacactgccggcgaccggcgcacgggtgcgtaacgcgtatgcaacctgcccgtaacagggggataactcggggaaacccgaactaataccccgtattgacaaggggccgcatggtcttttgtcgaaagcttcggtggttacggatgg

SEQ ID NO: 24 - DNA, 225 bp, Unknown
  Encodes 16S rRNA from Howardella
agagtttgatcatggctcaggataaacgctggcggcgcacataagacatgcaagtcgaacggaagtcgttgtaatgatgtggacatgaacggagaacttgttcaaagagagtgaaaattgacttacaacaatggctttagtggcggactggtgagtaatgtataagtaacctgcctatcagaggggaacaacagttggaaacgactgctaataccgcatatgcca

SEQ ID NO: 25 - DNA, 225 bp, Unknown
  Encodes 16S rRNA from Prevotella
agagtttgatcatggctcaggatgaacgctagcggcaggcttaacacatgcaagtcgaggggcagcgtggagtagcaatactctgacggcgaccggcgaaagggtgagtaacgcgtgagcaacatgcccgtagttgggggatagtcgatggaaacgtcgcgtaataccccgtaacaacagaggccgcatgacctttgtttaagagatttattgtctacggattgg

SEQ ID NO: 26 - DNA, 225 bp, Unknown
  Encodes 16S rRNA from Butyricimonas
agagtttgatcatggctcaggatgaacgctagcggcaggcttaacacatgcaagtcgaggggcagcgggtgtagcaatacatgccggcgaccggcgaaagggtgagtaacgcgtgagcaacgtgcccgtatgtgggggatagtcgatggaaacgtcgcgtaataccccgtaacacattttcccgcatgggaatatgttgaaagatttattgcatacggatcggct

SEQ ID NO: 27 - DNA, 225 bp, Unknown
  Encodes 16S rRNA from Clostridium sensu stricto
agagtttgatcatggctcaggacgaacgctggcggcgtgcctaacacatgcaagtcgagcggggacatgcgacggataggaagttttcggatggaattgaagatgtatgttctagcggcggacgggtgagtaacgcgtgagcaacctgtccttcacagggggataacacagcgaaagttgtactaataccgcataagaccacagtgagacatctcacaggggtca

SEQ ID NO: 28 - DNA, 225 bp, Unknown
  Encodes 16S rRNA from Clostridium sensu stricto
agagtttgatcctggctcaggacgaacgctggcggcgtgcttaacacatgcaagtcgagcgatgaagttccttcgggaatggattagcggcggacgggtgagtaacacgtgggtaacctgcctcatagaggggaatagcctttcgaaaggaagattaataccgcataagattgtagcaccgcatggtgcagcaattaaaggagtaatccgctatgagatggaccc

SEQ ID NO: 29 - DNA, 225 bp, Unknown
  Encodes 16S rRNA from Saccharofermentans
agagtttgatcctggctcaggatgaacgctggcggcgtgcctaacacatgcaagtcgaacggagttactagagcttgctttggtaacttagtggcggacgggtgagtaatgtatgagcaacctgcctttcagagggggacaacagttggaaacgactgctaataccgcataatgtgcgaagggggcatcccttttgtaccaaaggagcaatccgctgaaagatgg

SEQ ID NO: 30 - DNA, 225 bp, Unknown
  Encodes 16S rRNA from Lachnospiraceae incertae sedis
agagtttgatcatggctcaggatgaacgctggcggcgtgcttaacacatgcaagtcgaacgaagcatttttcgattcttcggaaaagaggaatgactgagtggcggacgggtgagtaacgcgtgggaaacctgccttataccgggggatagcagttggaaacgactggtaaaaccgcataagcgcacgggtacgcatgtatctgtgtgaaaaactctggtggtat

SEQ ID NO: 31 - DNA, 225 bp, Unknown
  ITS2 sequence of Pyromyces
tcctccgcttattgatatgcttaagttcagcgggtactcttatctgatttgagatcaagttatttaattaaattttcctttgttggattttttctaaaaaaatacaaaattgtttaggttattcctttttacgggaaaattttatccaattttatattaaaattagaaaaaatttcaataatcaaaaaatttaaagtgaaacaacttgtatcgttgtaaaacact

SEQ ID NO: 32 - DNA, 225 bp, Unknown
  ITS2 sequence of Candida xylopsoci
tcctccgcttattgatatgcttaagttcagcgggtattcctacctgatttgaggtcgagctttttgttgtctcgcaacactcgctctcggccgccaagcgtccctgaaaaaaagtctagttcgctcggccagcttcgctccctttcaggcgagtcgcagctccgacgctctttacacgtcgtccgctccgctcccccaactctgcgcacgcgcaagatggaaacg

SEQ ID NO: 33 - DNA, 225 bp, Unknown
  ITS2 Sequence of Orpinomyces
tcctccgcttattgatatgcttaagttcagcgggtactcttatctgatttgagatcaagttagttttataattaaatttccttttttgtaggtcaatttaagttttaactttaaaactgaaaagtttattcctttttacgggaaaattttatccaattttaaaaataaaaccaaattggcttattaaaaaaatcaatttaaagtgaaacaacttgttatcgttgt

SEQ ID NO: 34 - DNA, 225 bp, Unknown
  ITS2 sequence of Orpinomyces
tcctccgcttattgatatgcttaagttcagcgggtactcttatctgatttgagatcaagttatttataaataaatttcctttaactgtacggtatggaaactattaaaatttctaaaaaactgaaatagctttattcctttttacgggaaaattttatccaattttttaaaaaaattaaaatcgttccaaccgacgatttcaattaaaatccatttaaagtgaaa

SEQ ID NO: 35 - DNA, 225 bp, Unknown
  ITS2 sequence of Orpinomyces
tcctccgcttattgatatgcttaagttcagcgggtactcttatctgatttgagatcaagttagtttataaattaaatttccttttttcaaggtcaatttaggattttatttttaaaactgaaaagtttattcctttttacgggaaaattttatccaattttaataataaaaccaaattggctttttaaaaaatcaatttaaagtgaaacaacttgttatcgttgt

SEQ ID NO: 36 - DNA, 225 bp, Unknown
  ITS2 sequence of Candida apicol
tcctccgcttattgatatgcttaagttcagcgggtagccttgcttgattggaggccaaaagattgtaagtaactgcacagagttatctaacgtgtgcacttccattcttttgactcctaaaaggagcagaacctcgtactacaatgaagtagtatgagagaaagatcggcgctccaacaagcatgccattaggagaacctaatggcgcaatgtgcgttcaaagat

SEQ ID NO: 37 - DNA, 225 bp, Unknown
  ITS2 sequence of Candida rugosa
tcctccgcttattgatatgcttaagttcagcgggtagtcctacctgatttgagaataagatcaagagtctgtaacaagcttaactgttttagacaatttcgtttctggcagacgcctgccggcgtggtgcccaacaccttgcgagagagaaatattgctcaaacaggcatgctgtgtggaatgccacacagcgcaatgtgcgttcaaagattcgatgattcacga

SEQ ID NO: 38 - DNA, 225 bp, Unknown
  ITS2 sequence of Neocallimastix
tcctccgcttattgatatgcttaagttcagcgggtactcttatctgatttgagatcaagttatttaaataaatttccttttaaaatcggaccgtttgttggtaataattaaaaaactgaaaagtttattcctttttacgggaaaattttatccaattttttattaaaaccataaatggtcttaaattaaaatgaatttaaagtgaaacaacttgtttatcgttgt

SEQ ID NO: 39 - DNA, 225 bp, Unknown
  ITS2 sequence of Orpinomyces
tcctccgcttattgatatgcttaagttcagcgggtactcttatctgatttgagatcaagttatttagttaaatttccttttaattaggcacaattaagttttaactattaaaactgaaaagttattcctttttacgggaaaattttatccaattttattagataaaaccaaaaattggcttttaaaaatcaatttaaagtgaaacaacttgtttatcgttgtaaa

SEQ ID NO: 40 - DNA, 225 bp, Unknown
  ITS2 sequence of Orpinomyces
tcctccgcttattgatatgcttaagttcagcgggtactcttatctgatttgagatcaagttatttataaataaatttcctttaactgtacggtatggaaactattaaaatttctaaaaaaactgaaatagcttattccttttttacgggaaaattttatccaattttttaaaaaaaattaaaatcgttcccaaccgacgatttcaattaaaatccatttaaagtg

SEQ ID NO: 41 - DNA, 225 bp, Unknown
  ITS2 sequence of Neocallimastix
tcctccgcttattgatatgcttaagttcagcgggtactcttatctgatttgagatcaagttatttaaataaatttccttttaaaatcggaccgagatttctctaactaaaactgaaaagtttattcctttttacgggaaaattttatccaattttaattattaaaaccataaaggtcttaattaaaatgaatttaaagtgaaacaacttgtttatcgttgtaaaa

SEQ ID NO: 42 - DNA, 225 bp, Unknown
  ITS2 sequence of Neocallimastix
tcctccgcttattgatatgcttaagttcagcgggtactcttatctgatttgagatcaagttatttaaattataaatttccttttaaaatcggaccgtttgttggtaataattaaaaaaactgaaaagtttattcctttttacgggaaaattttatccaatttttttttattaaaaccaaaaatggtcttaaattaaaatgaatttaaagtgaaacaacttgttta

SEQ ID NO: 43 - DNA, 225 bp, Unknown
  ITS2 sequence of Ascomycota
tcctccgcttattgatatgcttaagttcagcgggtagtcttgcttgatttgaggccaaatataaaaatatagtgttaatggctgcataactagaaccaagaatgcttagcactcgggctagtcacactgaccaccttctggctacatttagattcggtcctgagacttgaatcaaatcgcattgctgcataaaggtatgcggcactcaaacaaacatgcctcaaa

SEQ ID NO: 44 - DNA, 225 bp, Unknown
  ITS2 sequence of Piromyces
tcctccgcttattgatatgcttaagttcagcgggtactcttatctgatttgagatcaagttaatttttacttttttcctttttttatcaagaaaaatcaaaccaattttaattttttaaaattgtttaggttattcctttttacgggaaaattttatccaattttaaaaaatctttaaaattagcttttaatgattttttttgatgacaaagaatttaaagtgaa

SEQ ID NO: 45 - DNA, 225 bp, Unknown
  ITS2 sequence of Orpinomyces
tcctccgcttattgatatgcttaagttcagcgggtactcttatctgatttgagatcaagttagttttataattaaatttccttttttcaaggtcaattaggattttatttttaaaactgaaaagtttattccttttttacgggaaaattttatccaattttaataataaaaaccaaattggctttttaaaaaatcaatttaaagtgaaacaacttgttatcgttg

SEQ ID NO: 46 - DNA, 225 bp, Unknown
  ITS2 sequence of Cyllamyces
tcctccgcttattgatatgcttaagttcagcgggtactcttatctgatttgagatcaagttaatttgacttttcctttttatgtcaaaagaaatcgctaattttaatattttttaaaattgtttaggttattcctttttacaggaaaattttatccaattttaaaaaaaatctttaaaattagtttaatgattttttttgataacaaagaatttaaagtgaaaca

SEQ ID NO: 47 - DNA, 225 bp, Unknown
  ITS2 sequence of Piromyces
tcctccgcttattgatatgcttaagttcagcgggtactcttatctgatttgagatcaagttaatttgactttttccttttttaattcaaaaagaaatcaaaccaatttcatttttcttaaaattgtttaggttattccttttttacgggaaaattttatccaattttaaaaaaaatctttaaaattagtttttaaatgattttttttgataacaaagaatttaaa

SEQ ID NO: 48 - DNA, 225 bp, Unknown
  ITS2 sequence of Cyllamyces
tcctccgcttattgatatgcttaagttcagcgggtactcttatctgatttgagatcaagttaatttttacttttttttccttgttagatctttttaaaaaatcaaactaattcatttattaaaattgtttaggttattcctttttacgggaaaattttatccaattttaaaaaaaaatcagtttttaaatgattttttaataagacaaagaatttaaagtgaaac

SEQ ID NO: 49 - DNA, 225 bp, Unknown
  ITS2 sequence of Piromyces
tcctccgcttattgatatgcttaagttcagcgggtactcttatctgatttgagatcaagttatttaattaaattttcctttacttgggattttttctaaaaaaaatacaaaattgtttaggttattcctttttacgggaaaattttatccaattttatattaaaattagaaaaaatttcaataacaaaaaatttaaagtgaaacaacttgtatcgttgtaaaaca

SEQ ID NO: 50 - DNA, 225 bp, Unknown
  ITS2 sequence of Piromyces
tcctccgcttattgatatgcttaagttcagcgggtactcttatctgatttgagatcaagttaatttttactttttcctttttttatcaagaaaaatcaaaccaattttaattttttaaaattgtttaaggttattcctttttacgggaaaattttatccaattttaaaaaatctttaaaattagcttttaatgatttttttgatgacaaagaatttaaagtgaaa

SEQ ID NO: 51 - DNA, 225 bp, Unknown
  ITS2 sequence of Neocallimastix
tcctccgcttattgatatgcttaagttcagcgggtactcttatctgatttgagatcaagttatttaaaataaatttccttttaaaatcggaccgagatttctctaactaaaactgaaaagtttattcctttttacgggaaaattttatccaattttaattattaaaaccataaggtcttaaattaaaatgaatttaaagtgaaacaacttgtttatcgttataaa

SEQ ID NO: 52 - DNA, 225 bp, Unknown
  ITS2 sequence of Piromyces
tcctccgcttattgatatgcttaagttcagcgggtactcttatctgatttgagatcaagttatttttaaataaattttccttttattttgaaaaattctaattaaaaattaaaattgtttaggttattcctttttacaggaaaattttatccaattttattttaaaattagaaaaaaatttcaaattttaaaaaaatttaaagtgaaacaacttgtatcgttgta

SEQ ID NO: 53 - DNA, 225 bp, Unknown
  ITS2 sequence of Neocallimastix
tcctccgcttattgatatgcttaagttcagcgggtactcttatctgatttgagatcaagttatttaaattataaatttccttttaaaatcggaccgagatttctctaactaaaactgaaaagtttattccttttttacgggaaaattttatccaattttaattattaaaaccatattggtcttaattaaaatgaatttaaagtgaaacaacttatttatcgttgt

SEQ ID NO: 54 - DNA, 225 bp, Unknown
  ITS2 sequence of Saccharomycetales
tcctccgcttattgatatgcttaagttcagcgggtattcctacctgatctgaggtcgagctcatagtgctcggagaccccaagcgtcctgttctagttcgctcgtggcctcgtttcttttcggcggggccgtggccgggccagctctgcgcaactctcgtcttgcaagaaggaaacgacgctcagacaggcatgcccgccggaatgccgacgggcgcaatgtgcg

SEQ ID NO: 55 - DNA, 225 bp, Unknown
  ITS2 sequence of Piromyces
tcctccgcttattgatatgcttaagttcagcgggtactctcttatctgatttgagatcaagttatttaattaaattttccttttggattttttctaaaaaaatacaaaattgtttaggttattcctttttacgggaaaattttatccaattttatattaaaattagaaaaaatttcaataacaaaaaatttaaagtgaaacaacttgtatcgttgtaaaacactc

SEQ ID NO: 56 - DNA, 225 bp, Unknown
  ITS2 sequence of Orpinomyces
tcctccgcttattgatatgcttaagttcagcgggtactcttatctgatttgagatcaagttatttataaataaatttcctttaactgtaccggtatggaaattattaaaattagaaaaaatttcaataatcaaaaaatttaaagtgaaacaacttgtatcgttgtaaaacactcatcaccataaaaacaaaaaagtttttatgagaatattttactgatactcaa

SEQ ID NO: 57 - DNA, 225 bp, Unknown
  ITS2 sequence of Piromyces
tcctccgcttattgatttgcttaagttcagcgggtactcttatctgatttgagatcaagttatttaattaaattttcctttacttgggattttttctaaaaaaaatacaaaattgtttaggttattcctttttacgggaaaattttatccaattttatattaaaattagaaaaaatttcaataatcaaaaaatttaaagtaaaacaacttgtttatcgttgtaaa

SEQ ID NO: 58 - DNA, 225 bp, Unknown
  ITS2 sequence of Phyllosticta capitalensis
tcctccgcttattgatatgcttaagttcagcgggtagtcctacctgatttgaggtcagagattaagaaatattggtgttgtaagcagacactgaccactcgggtgacgaaacttattacgtcaagctaatgggtcatccactaacgcatttaaggcgagccagatggcaacgcccaagtccaagccgattaggaaaccctaatggttgatatttcatgacactca

SEQ ID NO: 59 - DNA, 225 bp, Unknown
  ITS2 sequence of Orpinomyces
tcctccgcttattgatatgcttcagttcagcgggtactcttatctgatttgagatcaagttatttataaataaatttcctttaaactgtacggtatggaaactattaaaatttctaaaaaactgaaatagtttattcctttttacgggaaaattttatccaattttttaaaaaaattaaatcgttccaaccgacgatttcaattaaaatccatttaaagtgaaac

SEQ ID NO: 60 - DNA, 225 bp, Unknown
  ITS2 sequence of Orpinomyces
tcctcgcttattgatatgcttagttcagcgggtactcttatctgatttgagatcaagttatttataaataaatttcctttaactgtacggtatggaaactaattaaaatttctaaaaaactgaaatagcttattccttttttacgggaaaattttatccaattttttaaaaaaattaaaatcgttcccaaccgacgatttcaattaaaatccatttaaagtgaaa

SEQ ID NO: 61 - DNA, 225 bp, Unknown
  Encodes 16S rRNA from Corynebacterium
agagtttgatcctggctcaggacgaacgctggcggcgtgcttaacacatgcaagtcgaacggaaaggcccagcttgctgggtgctcgagtggcgaacgggtgagtaacacgtgggtgatctgcccctaacttcgggataagcttgggaaactgggtctaataccggataggacaatcgtttagtgtcggttgtggaaagttttttcggttagggatgagcccgcg

SEQ ID NO: 62 - DNA, 225 bp, Unknown
  Encodes 16S rRNA from Prevotella
agagtttgatcatggctcaggatgaacgctagctacaggcttaacacatgcaagtcgaggggtaacatgaagaaagcttgctttctttgatgacgaccggcgcacgggtgagtatcgcgtatccaacctgcccataagtagggaatagccttgcgaaagtaagattaatgccctatggtttccattaaagacatctgagatggaataaagatttatcgcttatgg

SEQ ID NO: 63 - DNA, 225 bp, Unknown
  Encodes 16S rRNA from Comamonas
agagtttgatcctggctcagattgaacgctggcggcatgccttacacatgcaagtcgaacggtaacgggtccttcgggatgccgacgagtggcgaacgggtgagtaatacatcggaacgtgcctggtagtgggggataactactcgaaagagtggctaataccgcatgagatctcaggatgaaagcaggggaccctcgggccttgcgctatcagagcggccgatg

SEQ ID NO: 64 - DNA, 225 bp, Unknown
  Encodes 16S rRNA from Clostridium XlVa
agagtttgatcctggctcaggatgaacgctggcggcgtgcctaacacatgcaagtcgaacgagcgagagatgaaacctagtgattctcaagcgagtggcggacgggtgagtaacgcgtgggtaacctgccttacagagggggataacagtctgaaaagactgctaataccgcataagcacacagtaccgcatggtacagggtgaaaagatttatcactgtaagat

SEQ ID NO: 65 - DNA, 225 bp, Unknown
  Encodes 16S rRNA from Hippea
agagtttgatcatggctcagagttaacgctggcggcgtgcctaacacatgcaagtcgagcgaattcttacagagtatcgtaagagttagcggcaaacgggtgagtaacacatgggaaacctcccttagaatggggaacatctccgtgaaaacggagctaataccgcataagaccacagtttggcatcaaacaggggtaaaagcagcaatgcgttctaagatggtc

SEQ ID NO: 66 - DNA, 225 bp, Unknown
  Encodes 16S rRNA from Anaerovorax
agagtttgatcatggctcaggatgaacgctggcggcgtgcctaacacatgcaagtcgagcgagaaacctgtaattgacgcttcggtagattttacaggcggaaagcggcggacgggtgagtaacgcgtaggcaacctgccccatgcacagggatagcctcgggaaaccgggattaaaacctgatgataccgcattgtcacatgacggagcggtcaaagatttatc

SEQ ID NO: 67 - DNA, 225 bp, Unknown
  Encodes 16S rRNA from Clostridium XlVa
agagtttgatcatggctcaggatgaacgctggcggcgtgcctaacacatgcaagtcgaacggaaatgtttagatgaagttttcggatggattcttttcattttagtggcggacgggtgagtaacacgtgggtaacctgccctgtaccgggggataacacttagaaataggtgataataccgcataagcgcacactgacgcatgtcagagtgtgaaaaactccggt

SEQ ID NO: 68 - DNA, 225 bp, Unknown
  Encodes 16S rRNA from Rummeliibacillus
agagtttgatcctggctcaggacgaacgctggcggcgtgcctaatacatgcaagtcgagcgaatgacgaggagcttgctcctctgatttagcggcggacgggtgagtaacacgtgggtaacctgccctgtagactgggataacttcgggaaaccggagctaataccggataatccttttaacctcatggttttaagttgaaaggcgcttcggcgtcactacagga

SEQ ID NO: 69 - DNA, 225 bp, Unknown
  Encodes 16S rRNA from Clostridium XlVa
agagtttgatcctggctcaggatgaacgctggcggcgtgcctaacacatgcaagtcgaacggaaatgttttgatgaagatttcggttggattcatttcattttagtggcggacgggtgagtaacacgtgggtaacctgccctgtaccgggggataacacttagaaataggtgataataccgcataagcgcacactgacgcatgtcagagtgtgaaaaactccggt

SEQ ID NO: 70 - DNA, 225 bp, Unknown
  Encodes 16S rRNA from Lachnospiracea incertae sedis
agagtttgatcctggctcaggatgaacgctggcggcgtgcttaacacatgcaagtcgagcgaagcactctggaagattccttcgggatgattccttagtgacttagcggcggacgggtgagtaacgcgtgggcaacctgccttgtacagggggataacagttagaaatgactgctaataccgcataagcacacagcatggcatcatgcagtgtgaaaaactccgg

SEQ ID NO: 71 - DNA, 225 bp, Unknown
  Encodes 16S rRNA from Prevotella
agagtttgatcatggctcaggatgaacgctagctacaggcttaacacatgcaagtcgaggggcatcaggacggtagcttgctatcgttgctggcgaccggcgcacgggtgagtaacgcgtatccaaccttcccatgactccggttcagcccgccgaaaggcggattactcccggatggtttccgaagagggcatctgatttggaataaagattgatcggtcatgg

SEQ ID NO: 72 - DNA, 225 bp, Unknown
  Encodes 16S rRNA from Anaerovorax
agagtttgatcatggctcaggatgaacgctggcggcgtgcctaacacatgcaagtcgagcgagaaacctgcaaatgaagtttcgacagattttacaggcggaaagcggcggacgggtgagtaacgcgtaggcaacctgccccttgcacagggatagcctcgggaaaccgggattaaaacctgataacaccgcactttcacatgtaagagcggtcaaagatttatc

SEQ ID NO: 73 - DNA, 225 bp, Unknown
  Encodes 16S rRNA from Pseudoflavonifractor
agagtttgatcatggctcaggacgaacgctggcggcgtgcttaacacatgcaagtcgaacggacgatttcccttcggggagaaagttagtggcggacgggtgagtaacgcgtgagtaacctgccttggaatgggggataacacagggaaacctgtgctaataccgcataacatcgcgttggggcatcccaatgcgatcaaagatttattgttccaagatgggctc

SEQ ID NO: 74 - DNA, 225 bp, Unknown
  Encodes 16S rRNA from Prevotella
agagtttgatcatggctcaggatgaacgctagctacaggcttaacacatgcaagtcgaggggcagcatgtatctggcttgccagatatgatggcgaccggcgcacgggtgcgtaacgcgtgttcgacctaccctttactcgggaacagcccatcgaaagatggattaatgcccgatgttctccctatatcgcatggtatttggagcaaagatttatcggtagagg

SEQ ID NO: 75 - DNA, 225 bp, Unknown
  Encodes 16S rRNA from Clostridium XlVa
agagtttgatcctggctcaggatgaacgctggcggcgtgcctaacacatgcaagtcgagcggagatacttgataagcttgcttaatgagtatcttagcggcggatgggtgaggaacgcgtggagaacctgcccttcacagggggataacagctggaaacggctgttaataccgcatatgctcacagcgccgcatggcgcagggaggaaagcgcacagtggtgaag

SEQ ID NO: 76 - DNA, 225 bp, Unknown; identical to SEQ ID NO: 75
  Encodes 16S rRNA from Clostridium XlVa

SEQ ID NO: 77 - DNA, 184 bp, Unknown
  Encodes 16S rRNA from Coprococcus
agagtttgatcatggctcaggataaacgctggcggcgtgctttggacaatgggggaaaccctgatccagcgacgccgcgtgaacgatgaagtatttcggtatgtaaagttctatcagcagggaagataatgacggtacctgactaagaagcaccggctaaatacgtgccagcagccgcggtaat

SEQ ID NO: 78 - DNA, 225 bp, Unknown
  Encodes 16S rRNA from Pyramidobacter
agagtttgatcatggctcaggatgaacgctggcggcgtgcttaacacatgcaagttgcgcggggatctgacgatgagacttcggtggatttgttagatccaagcggcggacgggtgagtaaagcacaaggacgtgtccgagcgagggggacaactgcgggaaaccgtagctaataccccgtaagccgagaggtgaaagcagcaatgcgcgagcggagcgacttgt

SEQ ID NO: 79 - DNA, 225 bp, Unknown
  Encodes 16S rRNA from Syntrophococcus
agagtttgatcctggctcaggatgaacgctggcggcgtgcctaacacatgcaagtcgagcggagtgtgacgagtgcttgcacatgtcatacttagcggcggatgggtgaggaacgcgtggagaacctgcctctcacagggggataacagttggaaacgactgttaataccgcatatgctcacggtgccgcatggcacagggaggaaagatttcatcggtgagaga

SEQ ID NO: 80 - DNA, 225 bp, Unknown
  Encodes 16S rRNA from Prevotella
agagtttgatcctggctcaggatgaacgctagctacaggcttaacacatgcaagtcgaggggcagcatgttgtgtgcttgcacacaatgatggcgaccggcgcacgggtgagtaacgcgtatccaaccttcccatgactccggttcagcccgccgaaaggcggattactcccggatggtttccgaagagggcatctgatttggaataaagattgatcggtcatgg

SEQ ID NO: 81 - DNA, 225 bp, Unknown
  Encodes 16S rRNA from Clostridium XlVa
agagtttgatcctggctcaggatgaacgctggcggcgtgcctaacacatgcaagtcgaacgaagcactttggaagcttgcttttaaagtgactgagtggcggacgggtgagtaacgcgtggataacctgcctcacacagggggataacagttagaaatgactgctaataccgcatatgcctacagtaccgcatggtacaggagggaaagatttatcggtgtgaga

SEQ ID NO: 82 - DNA, 225 bp, Unknown
  Encodes 16S rRNA from Prevotella
agagtttgatcatggctcaggatgaacgctagctacaggcttaacacatgcaagtcgcggggcatcatgacgatagcttgctattgttgatggcgaccggcgcacgggtgagtaacgcgtatccaacctgcccccaagtagggcacagcccggcgaaagtcggattaattccctatgtggtcatgttatggcatcagtatatgactaaaggctttggttgcttgg

SEQ ID NO: 83 - DNA, 225 bp, Unknown
  Encodes 16S rRNA from Roseburia
agagtttgatcatggctcaggatgaacgctggcggcgtgcttaacacatgcaagtcgaacgaagcacctggtcacgatcccttcggggtgacgaccttgtgactgagtggcggacgggtgagtaacgcgtgggaaacctgccatgtactgggggataacagttggaaacgactgctaataccgcataaaactgtcggatcgcatgatctgatagccaaaactccg

SEQ ID NO: 84 - DNA, 225 bp, Unknown
  Encodes 16S rRNA from Clostridium XlVa
agagtttgatcctggctcaggatgaacgctggcggcgtgcctaacacatgcaagtcgagcggagaggttgcggagattcaatcgatgatctgcttcttcttagcggcggatgggtgagtaacacgtgggtaacctgccctgcactggggaataacagttggaaacgactgttaataccgcatatgcgcacggggtcgcatgaccccgggcggaaagatttatcgg

SEQ ID NO: 85 - DNA, 225 bp, Unknown
  Encodes 16S rRNA from Lachnospiracea incertae sedis
agagtttgatcctggctcaggatgaacgctggcggcgtgcttaacacatgcaagtcgagcgaagcactctggaagattccttcgggatgattccttagtgacttagcggcggacgggtgagtaacgcgtgggcaacctgccttgtacagggggataacagttagaaatgactgctaataccgcataagcgcacagcatggcatcatgcagtgcgaaaaactccgg

SEQ ID NO: 86 - DNA, 225 bp, Unknown
  Encodes 16S rRNA from Clostridium XlVa
agagtttgatcctggctcaggatgaacgctggcggcgtgcttaatacatgcaagtcgaacggagtacttagaagaagttttcggaccaattctttgtacttagtggcggacgggtgagtaacgcgtgggtaacctgccgtatgcagggggacaacagccggaaacagctgctaataccgcataagccggcagcaccgcatggtgcagtcggaaaagatttatcgg

SEQ ID NO: 87 - DNA, 225 bp, Unknown
  Encodes 16S rRNA from Acidothermus
agagtttgatcctggctcaggatgaacgctggcggcgtgcttaacacatgcaagtcgaacgagaacgttcccttcggggaactagtaaagtggcgaacgggtgagtaacacgtgggcaacctaccccttacattgggataacgcagagaaatttgcgctaataccggatacttcgttttgagggcatcctcgttacgagaaagcttttgcggtaagggatgggcc

SEQ ID NO: 88 - DNA, 225 bp, Unknown
  Encodes 16S rRNA from Adlercreutzia
agagtttgatcctggctcaggatgaacgctggcggcgtgcctaacacatgcaagtcgaacggttaaaccggcttcggccggaaatagagtggcgaacgggtgagtaacacgtgaccaacctgccccgcgcaccgggatagccccccgaaagggggattaataccggatgcgccgggagggccgcatggccctcccgggaaagcctttgcggcgcgggatggggtc

SEQ ID NO: 89 - DNA, 225 bp, Unknown
  Encodes 16S rRNA from Prevotella
agagtttgatcctggctcaggatgaacgctagctacaggcttaacacatgcaagtcgaggggcagcatgggagttgcttgcaattcccgatggcgaccggcgcacgggtgagtaacgcgtatccaaccttcccttaactccggaatagcccgctgaaaggcggattaatgccggatgcggtccagcgagggcatctgacccggaccaaaggttttctccggttaa

SEQ ID NO: 90 - DNA, 225 bp, Unknown
  Encodes 16S rRNA from Lachnospiracea incertae sedis
agagtttgatcctggctcaggatgaacgctggcggcgtgcctaacacatgcaagtcgaacggggtaaggacaccggatgaagattcgtcagattccaccgtccttacttagtggcggacgggtgagtaacgcgtgggcaacctgccctgtacaggggaatagcagctggaaacggctggtaaaaccgcatatgcgcgcagtaccgcatggtacagcgcggaaaac

SEQ ID NO: 91 - DNA, 225 bp, Unknown
  Encodes 16S rRNA from Proteiniclasticum
agagtttgatcatggctcaggacgaacgctggcggcgtgcctaacacatgcaagtcgagcggggattatgctggaaggttttcggactggaaggtatgatcttagcggcggacgggtgagtaacgcgtgagcaacctgccttcaacagggggataacgcatcgaaagatgtgctaataccgcgtaagaccatagtaccgcatggtacaggggtcaaaggagcaat

SEQ ID NO: 92 - DNA, 225 bp, Unknown
  Encodes 16S rRNA from Lachnospiracea incertae sedis
agagtttgatcctggctcaggataaacgctggcggcgtgcttaacacatgcaagtcgaacggggttatttcgagtagcttgctacatgaaataacctagtggcggacgggtgagtaacgcgtgggaaacctgcctcgtactgggggataacagttggaaacgactgttaataccgcataagcgcacgatgtcgcatgacatagtgtgaaaaactccggtggtacg

SEQ ID NO: 93 - DNA, 225 bp, Unknown
  Encodes 16S rRNA from Anaerovorax
agagtttgatcctggctcaggatgaacgctggcggcgtgcctaacacatgcaagtcgagcgtgattcactgaaatgatacttcggtagaaatttcagtgatgaaagcggcggacgggtgagtaacgcgtaggcaacctgccctttgcagggggatagccgttggaaacgacgattaaaaccccataatgcagcctgatctcctgttcgggctgccaaagatttat

SEQ ID NO: 94 - DNA, 225 bp, Unknown
  Encodes 16S rRNA from Prevotella
agagtttgatcctggctcaggatgaacgctagctacaggcttaacacatgcaagtcgaggggcagcagggcaatagcttgctattgttgctggcgaccggcgcacgggtgagtaacgcgtatccaacctaccccgcggtcagggacagcccggcgaaagtcggattaatacctgatgcagtcagaagagggcatctgattttgacgaaagattgatcgcctcggg

SEQ ID NO: 95 - DNA, 225 bp, Unknown
  Encodes 16S rRNA from Bacteroides
agagtttgatcctggctcaggatgaacgctagctacaggcctaacacatgcaagtcgcggggcagcattgaggtagcaatacctcagatggcgaccggcgcacgggtgcgtaacgcgtatccaacctggcccttactcgggtatagccctgcgaaagtaggattaatccccgatgttgtcaagatggagccttttttcttgaccaaaggcattagtcggtaaggg

SEQ ID NO: 96 - DNA, 225 bp, Unknown
  Encodes 16S rRNA from Clostridium III
agagtttgatcatggctcaggacgaacgctggcggcatgcctaacacatgcaagtcgaacggagttacaagagcttgcttttgtaacttagtggcggacgggtgagtaacgcgtgagcaacctacccttcagtggggaataatgttttgaaaagaacactaataccgcatgacatatgaccaccgcatgatggacatatcaaaggatttatttgctgaaggatgg

SEQ ID NO: 97 - DNA, 225 bp, Unknown
  Encodes 16S rRNA from Prevotella
agagtttgatcatggctcaggatgaacgctagctacaggcttaacacatgcaagtcgaggggcagcgggaggaaagcttgctttccttgccggcgaccggcgcacgggtgcgtaacgcgtatcgaacctggcccatacacggggatagtctcctgaaagggaggttaatacccggcggtcccacttggtcgcatgactgtgtgggtgaagattcatcggtatggg

SEQ ID NO: 98 - DNA, 225 bp, Unknown
  Encodes 16S rRNA from Acinetobacter
agagtttgatcatggctcagattgaacgctggcggcaggcttaacacatgcaagtcgagcggagataggtagcttgctactgattcttagcggcggacgggtgagtaatgcttaggaatctgcctattagtgggggacaacgtttcgaaagggacgctaataccgcatacgccctacgggggaaagcaggggatcttcggaccttgcgctaatagatgagcctaa

SEQ ID NO: 99 - DNA, 225 bp, Unknown
  Encodes 16S rRNA from Erysipelothrix
agagtttgatcctggctcaggataaacgctggcggcgtgcctaatacatgcaagtcgaacggacatagcttgctatgtcagtggcgaacgggtgagtaatacataagcaacctgcctacagggaccgggataacacttggaaacgagcgctaataccggataggcaggatcggggcatcctgatcctgttaaagttgagagacacaagtagatgggcttatggcg

SEQ ID NO: 100 - DNA, 225 bp, Unknown
  Encodes 16S rRNA from Bacteroides
agagtttgatcatggctcaggatgaacgctagctacaggcttaacacatgcaagtcgaggggcagcattaagtcagcttgctgatttagatggcgaccggcgcacgggtgagtaacgcgtatccaacctgccccctacccggggatagccttgcgaaagtaagattaatacccggtgcagttatgattccgcatgggaatataacgaaagattcatcggtagggg

SEQ ID NO: 101 - DNA, 225 bp, Unknown
  Encodes 16S rRNA from Clostridium XlVa
agagtttgatcctggctcaggatgaacgctggcggcgtgcctaacacatgcaagtcgaacggagatattacggatgaaggattcgtctggaatctgttttatcttagtggcggacgggtgagtaacgcgtggagaacctgcctctttccgggggatagcagttggaaacgactggtaataccgcatgagcgcacagtaccgcatggtacggggtgaaaagattta

SEQ ID NO: 102 - DNA, 225 bp, Unknown
  Encodes 16S rRNA from Butyrivibrio
agagtttgatcatggctcaggatgaacgctggcggcgtgcctaacacatgcaagtcgaacggagtttagatgaaacctagtgattctaaacttagtggcggacgggtgagtaacgcgtgggtaacctgccctatagagtgggatagcagttagaaatgactgataataccacataagaccacagtacggcatcgtacaggggtcaaagatttatcgctataggat

SEQ ID NO: 103 - DNA, 225 bp, Unknown
  Encodes 16S rRNA from Eubacterium
agagtttgatcctggctcaggatgaacgctggcggcgtgcctaacacatgcaagtcgagcgagatatccatgacgaattcttcggatgcctgaatggatggaaagcggcggacgggtgagtaacgcgtaggtaacctgccctgtacaaggggatagccactggaaacggtgattaataccttatgacaccgcagcatcacatggtgaagcggtcaaagattttat

SEQ ID NO: 104 - DNA, 225 bp, Unknown
  Encodes 16S rRNA from Prevotella
agagtttgatcctggctcaggatgaacgctagctacaggcttaacacatgcaagtcgaggggcagcatgaaggaagcttgcttcctttgatggcgaccggcgcacgggtgagtaacgcgtatccaaccttcccttaacttgggaatagcccggtgaaaaccggattaatgcccgatgtggtccagcgagggcatctgacccggaccaaagagtttttcggttaag

SEQ ID NO: 105 - DNA, 225 bp, Unknown
  Encodes 16S rRNA from Eubacterium
agagtttgatcatggctcaggatgaacgctggcggcgtgcttaacacatgcaagtcgagcgagaaacttacagatgacgcttcggttgattcagtaagcggaaagcggcggacgggtgagtaacgcgtaggcaacctgcccctggcagagggatagcatcgggaaactgatattaagacctcataacgcatccatatcacatgatgaggatgccaaagatttatc

SEQ ID NO: 106 - DNA, 225 bp, Unknown
  Encodes 16S rRNA from Prevotella
agagtttgatcatggctcaggatgaacgctagctacaggcttaacacatgcaagtcgaggggcagcatgacgagtgcttgcacttgttgatggcgaccggcgcacgggtgcgtaacgcgtatcgaaccttccccttactcgggaatagcccggtgaaaaccgaattaatgcccgatatatatttagatggcatcagaagagtatgaaagatttatcggtaaggga

SEQ ID NO: 107 - DNA, 225 bp, Unknown
  Encodes 16S rRNA from Lachnospiracea incertae sedis
agagtttgatcatggctcaggatgaacgctggcggcgtgcctaacacatgcaagtcgaacggaccttttacagactgcgattcgtcaaaggaagttcaaggttagtggcggacgggtgagtaacgcgtgggtaacctgcctcgtagagggggataacagttggaaacgattgctaataccgcataagcccacaggaccgcatggtccagggggaaaagattcatc

SEQ ID NO: 108 - DNA, 225 bp, Unknown
  Encodes 16S rRNA from Coprococcus
agagtttgatcatggctcaggatgaacgctggcggcgtgcctaacacatgcaagtcgaacggagtgttacttcttcggagggaacacttagtggcggacgggtgagtaacgcgtgggtaacctgcctcatacagggggatagcagttggaaacgactgataataccgcataagcgcacagtaccgcatggtacagtgtgaaaaactccggtggtatgagatggac

SEQ ID NO: 109 - DNA, 204 bp, Unknown
  Encodes 16S rRNA from Prevotella
agagtttgatcatggctcaggatgaacgctagctacaggctttggtcaatgggcgagagcctgaaccagccaagtagcgtgcaggatgacggccctatgggttgtaaactgcttttgtatggggataaagtgctccacgtgtggagttttgtaggtaccatacgaataaggaccggctaattccgtgccagcagccgcggtaat

SEQ ID NO: 110 - DNA, 225 bp, Unknown
  Encodes 16S rRNA from Clostridium XlVa
agagtttgatcatggctcaggatgaacgctggcggcgtgcttaacacatgcaagtcgaacgaagcattttggttcaaagccttcgggcagcgaaacttaatgacttagtggcggacgggtgagtaacgcgtgggtaacctgccttgtactgggggataacagttagaaatgactgctaataccgcataagcccacggtttcgcatggaactgtgagaaaagattt

SEQ ID NO: 111 - DNA, 225 bp, Unknown
  Encodes 16S rRNA from Prevotella
agagtttgatcatggctcaggatgaacgctagctacaggcttaacacatgcaagtcgaggggcagcatgtaggttgcttgcaacctatgatggcgaccggcgcacgggtgcgtaacgcgtatccaaccttccccgcagtagggtgcagcccgttgaaagacggattaatcccctatgttgtccattgacggcatccgatttggacgaaagatttcatcgctgcgg

SEQ ID NO: 112 - DNA, 225 bp, Unknown
  Encodes 16S rRNA from Catonella
agagtttgatcctggctcaggatgaacgctggcggcgtgcctaacacatgcaagtcgaacggaggacttcggaagaagtcttcggatggattccgatgttcttagtggcggacgggtgagtaacgcgtgggtaatctgccctgtatcggggaatagcagctggaaacggctggtaataccgcgtacgccggttggatcgcatgatccgatcgggaaactttttaa

SEQ ID NO: 113 - DNA, 225 bp, Unknown
  Encodes 16S rRNA from Methanobrevibacter
agagtttgatcatggcagaagctactgctattgggattcgattaagccatgcaagtcgaacgaatttagattcgtggcgtacggctcagtaacacgtggataacctacccttaggactgggataactctgggaaactggggctaataccggatagatgatttttcttggaatgggattttgtttaaatgttttttcgcctaaggatgggtctgcggcagattagg

SEQ ID NO: 114 - DNA, 225 bp, Unknown
  Encodes 16S rRNA from Ruminococcus
agagtttgatcctggctcaggacgaacgctggcggcacgcctaacacatgcaagtcgaacggtgaatacttagcttgctttgtattcatagtggcggacgggtgagtaacacgtgagcaacctgcctctgagagagggatagcttctggaaacggatggtaatacctcatgatatagcgttctcgcatgagaatgctatcaaacgaatttcgctcagagatgggc

SEQ ID NO: 115 - DNA, 225 bp, Unknown
  Encodes 16S rRNA from Lachnospiracea incertae sedis
agagtttgatcatggctcaggatgaacgctggcggcacgcttaacacatgcaagtcgaacgaggcgaggagtgcttgcacaccgaacctagtggcggacgggtgcgtaacgcgtgggtaacctgccctaaacagggggataacgtatagaaatgtacgctaataccgcataagctcacggaaccgcatggttttgagggaaaaggatttccggtttaggatgggc

SEQ ID NO: 116 - DNA, 184 bp, Unknown
  Encodes 16S rRNA from Coprococcus
agagtttgatcatggctcaggataaacgctggcggcgtgctttgcacaatgggggaaaccctgatgcagcgacgccgcgtgagtgatgaagtatctcggtatgtaaagctctatcagcagggaagataatgacggtacctgactaagaagcaccggctaaatacgtgccagcagccgcggtaat

SEQ ID NO: 117 - DNA, 225 bp, Unknown
  Encodes 16S rRNA from Clostridium XlVa
agagtttgatcatggctcaggatgaacgctggcggcgtgcctaacacatgcaagtcgaacgaagcacttaattacgatcccttcggggtgacgattttgtgacttagtggcggacgggtgagtaacgcgtgggtaacctgccctgtactgggggacaacagttggaaacggctgctaataccgcataagcgcacgatatcgcatggtattgtgtgaaaaactccg

SEQ ID NO: 118 - DNA, 225 bp, Unknown
  Encodes 16S rRNA from Lachnospiracea incertae sedis
agagtttgatcatggctcaggataaacgctggcggcgtgcttaacacatgcaagtcgaacggggttatttcgagaagcttgcttcatgaaataacctagtggcggacgggtgagtaacgcgtgggaaacctgcctcgtactgggggataacagttggaaacgactgttaataccgcataagcgcacaatgttgcatgacatagtgtgaaaaactccggtggtacg

SEQ ID NO: 119 - DNA, 225 bp, Unknown
  Encodes 16S rRNA from Prevotella
agagtttgatcctggctcaggatgaacgctagctacaggcttaacacatgcaagtcgcggggcagcatgttgtgtgcttgcacacaatgatggcgaccggcgcacgggtgcgtaacgcgtatccaacctgccccttactctggaatagcccggcgaaagtcggattaatgccggatgttgtcagatgaggacatctgagtttgaccaaaggcttctgccggtaag

SEQ ID NO: 120 - DNA, 225 bp, Unknown
  Encodes 16S rRNA from Anaerovorax
agagtttgatcatggctcaggatgaacgctggcggcgtgcctaacacatgcaagtcgagcgagaaacttatgattgacgcttcggttgatttcataagcggaaagcggcggacgggtgagtaacgcgtaggcaacctgccccttgcagagggatagcctcgggaaaccgggattaaaacctcataatgctgatcctacacatgtttgatcagccaaagatttatc

SEQ ID NO: 121 - DNA, 225 bp, Unknown
  Encodes 16S rRNA from Asteroleplasma
agagtttgatcctggctcaggataaacgccggcggcgtgcctaatacatgcaagtcgaacgagaggtagcaatacctcgagtggcgtacgggtgagtaacacgttgggaacctgccccagggaccggaataccagacggaaacgtctgctaatgccggatgacgatccggaagcgtcggcttccggatccaaaggcggccttcaagccgcgccacgggatggccc

SEQ ID NO: 122 - DNA, 225 bp, Unknown
  Encodes 16S rRNA from Clostridium XlVa
agagtttgatcctggctcaggatgaacgctggcggcgcgcataacacatgcaagtcgaacggagtttagatgaaacctagtgattttaaacttagtggcggacgggtgagtaacgcgtgggtaacctacctggtattgggggacaacagttagaaatgactgctaataccgcatacgacatcggagaggcatctctctgatgtgaaaggagcaatccgatagcag

SEQ ID NO: 123 - DNA, 225 bp, Unknown
  Encodes 16S rRNA from Caulobacter
agagtttgatcatggctcagaacgaacgctggcggcatgcctaacacatgcaagtcgaacgagaccttcgggtctagtggcgcacgggtgcgtaacgcgtgggaatctgcccttgggttcggaataactcgccgaaaggcgtgctaataccggatgatgtcgtaagaccaaagatttatcgcccagggatgagcccgcgtaagattaggtagttggtgaggtaaa

SEQ ID NO: 124 - DNA, 225 bp, Unknown
  Encodes 16S rRNA from Lachnospiracea incertae sedis
agagtttgatcatggctcaggataaacgctggcggcgtgcttaacacatgcaagtcgaacggggttatttcgagtagcttgctacatgaaataacctagtggcggacgggtgagtaacgcgtgggaaacctgcctcgtactgggggataacagttggaaacgactgttaataccgcataagcgcacagtgtcgcatgacacagtgtgaaaaactccggtggtacg

SEQ ID NO: 125 - DNA, 225 bp, Unknown
  Encodes 16S rRNA from Roseburia
agagtttgatcatggctcaggatgaacgctggcggcgtgcctaacacatgcaagtcgagcggacctgattgagtgattagcttgctatgaactcatgactggttagcggcggacgggtgagtaacgcgtgggtaacctgcctcatacagggggatagcagttggaaacgactggtaataccgcataagcgcacagtaccgcatggtacggtgtgaaaaactccgg

SEQ ID NO: 126 - DNA, 225 bp, Unknown
  Encodes 16S rRNA from Clostridium XlVa
agagtttgatcatggctcaggatgaacgctggcggcgtgcctaacacatgcaagtcgaacggagtatcaatgaagcctagcgatttgatacttagtggcggacgggtgagtaacgcgtggataacctgcctcacacattgggataacagttagaaatggctgctaataccgaataagcccacagtgccgcatgacacagggggaaaagattttatcggtgtgaga

SEQ ID NO: 127 - DNA, 225 bp, Unknown
  Encodes 16S rRNA from Acinetobacter
agagtttgatcctggctcagattgaacgctggcggcaggcttaacacatgcaagtcgagcggagataggtagcttgctactgattcttagcggcggacgggtgagtaatgcttaggaatctgcctattagtgggggacaacgtttcgaaagggacgctaataccgcatacgccctacgggggaaagcaggggatcttcggaccttgcgctaatagatgagcctaa

SEQ ID NO: 128 - DNA, 225 bp, Unknown
  Encodes 16S rRNA from Bacteroides
agagtttgatcatggctcaggatgaacgctagctacaggcttaacacatgcaagtcgaggggcagcattaaggaagcttgctttcttagatggcgaccggcgcacgggtgagtaacgcgtatccaacctgccccctacccggggatagccttgcgaaagtaagattaatacccggtgctgttatgattccgcatgggaatataacgaaagattcatcggtagggg

SEQ ID NO: 129 - DNA, 225 bp, Unknown
  Encodes 16S rRNA from Erysipelothrix
agagtttgatcatggctcaggatgaacgctggcggcgtgcttaatacatgcaagtcgaacgcaagcgatcacttcggtggtcaattgagtggcgaacgggtgagtaatacataaggaacctgcccgtctgactgggataacagttggaaacgactgctaataccggataggtaaccttaaggcatcttgaggttattaaagttgagatacacagacggatggcct

SEQ ID NO: 130 - DNA, 225 bp, Unknown
  Encodes 16S rRNA from Coprococcus
agagtttgatcatggctcaggatgaacgctggcggcgtgcctaacacatgcaagtcgaacggggtgtctgatcttcggactggacacttagtggcggacgggtgagtaacgcgtgggtaacctgcctcatacagggggatagcagttggaaacgactgataataccgcataagcgcacagtaccgcatggtacagtgtgaaaaactccggtggtatgagatggac

SEQ ID NO: 131 - DNA, 225 bp, Unknown
  Encodes 16S rRNA from Clostridium XlVa
agagtttgatcctggctcaggatgaacgctggcggcgtgcctaacacatgcaagtcgaacggacccaaggaagagagtagcttgctatgaacttccggaaggttagtggcggacgggtgagtaacgcgtgggcaacctgccctgtactgggggatagcagctggaaacggctggtaataccgcataagcgcacagtaccgcatggtacagtgtgaaaagctccga

SEQ ID NO: 132 - DNA, 198 bp, Unknown
  Encodes 16S rRNA from Bacteroides
agagtttgatcatggctcaggatgaacgctagctacaggcttaacacatgcaagtcgaggggcagcatgaacttagcttgctaagtttgatggcgaccggcgcacgggtgagtaacgcgtatccgaccttccctttgctcggggatagcccagtgaaaactggattaagacccgatgtagtccagcagccgcggtaat

SEQ ID NO: 133 - DNA, 225 bp, Unknown
  Encodes 16S rRNA from Coprococcus
agagtttgatcatggctcaggatgaacgctggcggcgtgcctaacacatgcaagtcgaacggggtgtcatttcttcggagacgacacttagtggcggacgggtgagtaacgcgtgggtaacctgcctcatacagggggatagcagttggaaacgactgataataccgcataagcgcacagtaccgcatggtacagtgtgaaaaactccggtggtatgagatggac

SEQ ID NO: 134 - DNA, 225 bp, Unknown
  Encodes 16S rRNA from Anaerovorax
agagtttgatcctggctcaggatgaacgctggcggcgtgcctaacacatgcaagtcgagcgagaaacttacagatgacgcttcggtcgattcagtaagcggaaagcggcggacgggtgagtaacgcgtaggcaacctgcccttcacacagggatagcctctggaaacggggattaaaacctgataacgcataactgttgcatatcagatatgccaaagatttatc

SEQ ID NO: 135 - DNA, 225 bp, Unknown
  Encodes 16S rRNA from Pseudoflavonifractor
agagtttgatcatggctcaggatgaacgctggcggcgcgcctaacacatgcaagtcgaacggtgaagtcccttcgggggcggatcagtggcggacgggtgagtaacgcgtgagtaacctgcccttacgagcggaataacgtccggaaacagacgctaataccgcatgacacgtgcttccggcatcggaggcacgtcaaagatttatcgcgtaaggatggactcgc

SEQ ID NO: 136 - DNA, 225 bp, Unknown; identical to SEQ ID NO: 135
  Encodes 16S rRNA from Pseudoflavonifractor

SEQ ID NO: 137 - DNA, 225 bp, Unknown
  Encodes 16S rRNA from Prevotella
agagtttgatcatggctcaggatgaacgctagctacaggcttaacacatgcaagtcgaggggcagcatgacgagagcttgctcttgttgatggcgaccggcgcacgggtgcgtaacgcgtatccaaccttccccctgccagggaacagcccgttgaaagacggattaatgccctatgttgtgcgaagatggcatcagatttgcacgaaagattttatcggcatgg

SEQ ID NO: 138 - DNA, 185 bp, Unknown
  Encodes 16S rRNA from Lachnospiracea incertae sedis
agagtttgatcatggctcaggatgaacgctggcggcgtgcctatgcacaatggaggaaactctgatgcagcaacgccgcgtgagtgatgaagtagttcgctacgtaaagctctatcagtagggaagataatgacggtacctacacaagaagctccggctaaatacgtgccagcagccgcggtaat

SEQ ID NO: 139 - DNA, 225 bp, Unknown
  Encodes 16S rRNA from Roseburia
agagtttgatcatggctcaggatgaacgctggcggcgtgcctaacacatgcaagtcgagcggagatgcagaacggaagccttcgggtggaagatctgttatcttagcggcggacgggtgagtaacgcgtgggtaacctggctcatacagggggataacagagagaaatttctgctaataccgcataagcgcacagcatcgcatggtgcagtgtgaaaaactccgg

SEQ ID NO: 140 - DNA, 204 bp, Unknown
  Encodes 16S rRNA from Prevotella
agagtttgatcatggctcaggatgaacgctagctacaggctttggtcaatggatgagaatctgaaccagccaagtagcgtgcaggacgacggccctatgggttgtaaactgcttttgtacggggataaaggagcttacgtgtaagtttttgcaggtaccgtacgaataaggaccggctaattccgtgccagcagccgcggtaat

SEQ ID NO: 141 - DNA, 225 bp, Unknown
  Encodes 16S rRNA from Ruminococcus
agagtttgatcatggctcaggacgaacgctggcggcacgcctaacacatgcaagtcgaacggtagatacttagcttgctttgtatctatagtggcggacgggtgagtaacacgtgagcaacctgcctctgagagagggatagcttctggaaacggatggtaatacctcatgatatagcgttctcgcatgggaatgctatcaaaagaaattcgctcagagatgggc

SEQ ID NO: 142 - DNA, 225 bp, Unknown
  Encodes 16S rRNA from Atopobium
agagtttgatcctggctcaggatgaacgctggcggcgcgcctaacacatgcaagtcgaacgattaagacaccttcgggtgtgtataaagtggcgaacggctgagtaacacgtgggcaacctacccctctctctgggatagcctcgagaaatcgtgggtaataccggatactccggatccatcgcatggtggatccgggaaagctccgacggtgagggatgggccc

SEQ ID NO: 143 - DNA, 225 bp, Unknown
  Encodes 16S rRNA from Eubacterium
agagtttgatcctggctcaggatgaacgctggcggcgtgcttaacacatgcaagtcgaacggaacttattgaatgaagttttcggatggattttgataagtttagtggcggacgggtgagtaacgcgtgggtaacctgccctgtacagggggataacagttagaaatgactgttaataccgcataagaccacagcaccgcatggtgcaggggtaaaagctccgac

SEQ ID NO: 144 - DNA, 225 bp, Unknown
  Encodes 16S rRNA from Robinsoniella
agagtttgatcctggctcaggatgaacgctggcggcgtgcctaacacatgcaagtcgaacggggtgtcagctcttcggaacggacacttagtggcggacgggtgagtaacgcgtgggtaacctgcctcatacagggggatagcagttggaaacgactgataataccgcataagcgcacagtaccgcatggtacagtgtgaaaaactccggtggtatgagatggac

SEQ ID NO: 145 - DNA, 225 bp, Unknown
  Encodes 16S rRNA from Neisseria
agagtttgatcctggctcagattgaacgctggcggcatgctttacacatgcaagtcggacggcagcatcaagaagcttgcttcttggatggcgagtggcgaacgggtgagtaatgcatcggaatgtaccgagtaatgggggataactaatcgaaagattagctaataccgcatacgacctgagggtgaaagcaggggatcttcggaccttgcgttattcgagcag

SEQ ID NO: 146 - DNA, 225 bp, Unknown
  Encodes 16S rRNA from Ruminococcus
agagtttgatcctggctcaggacgaacgctggcggcacgcttaacacatgcaagtcgaacggagataatagcttcggttattaacttagtggcggacgggtgagtaacacgtgagcaacctgccttacagagcggaataatgactggaaacggtcactaataccacataacatatggagatcgcatggtatccatatcaaagatttatcgctgtaagatgggctc

SEQ ID NO: 147 - DNA, 225 bp, Unknown
  Encodes 16S rRNA from Prevotella
agagtttgatcatggctcaggatgaacgctagctacaggcttaacacatgcaagtcgaggggcagcatgcaggaagcttgctttctgtgatggcgaccggcgcacgggtgcgtaacgcgtatccaatctaccctgcacacgggaatagccctgcgaaagtaggattaatgcccgatgttctttttttgttgcatgacagagaaagcaaagatttatcggtacagg

SEQ ID NO: 148 - DNA, 225 bp, Unknown
  Encodes 16S rRNA from Slackia
agagtttgatcatggctcaggatgaacgctggcggcgtgcttaacacatgcaagtcgaacggttaaagcccacttcggtgggtgcataaagtggcgaacgggtgagtaacacgtgaccaacccgccccccgcaccgggataaccggcggaaacgcccgctaataccggatactccgcgacggccgcatggccgacgcgggaaagcccaggcggcgggggatgggg

SEQ ID NO: 149 - DNA, 225 bp, Unknown
  Encodes 16S rRNA from Prevotella
agagtttgatcatggctcaggatgaacgctagctacaggcttaacacatgcaagtcgcggggcatcatgaagggagcttgctctctttgatggcgaccggcgcacgggtgagtaacgcgtatccaacctgccccctagtagggaacagcccgtagaaatgcggattaatgccctatgttctccgaagacggcatcagattcggagcaaaggccttttggttgcta

SEQ ID NO: 150 - DNA, 225 bp, Unknown
  Encodes 16S rRNA from Clostridium XlVa
agagtttgatcctggctcaggatgaacgctggcggcgtgcctaacacatgcaagtcgagcggagttataagagcttgcttttataacttagcggcggatgggtgaggaacgcgtggataacctgcctcacactgggggataacagctggaaacggctgttaataccgcatatgctcacagtaccgcatggtacagggaggaaagatttatcggtgtgagatggat

SEQ ID NO: 151 - DNA, 225 bp, Unknown; identical to SEQ ID NO: 100
  Encodes 16S rRNA from Bacteroides

SEQ ID NO: 152 - DNA, 225 bp, Unknown
  Encodes 16S rRNA from Anaerorhabdus
agagtttgatcatggctcaggatgaacgctggcggcgtgcctaatacatgcaagtcgaacggggtaccttcgggtacctagtggcgaacgggtgagtaacacataaacaatctgccctggagactgggataccgtcgggaaaccgacgctaataccggataggcagtaagggggcatccccatactgttaaagctgggttgcagcgctgcaggatgagtttatgt

SEQ ID NO: 153 - DNA, 225 bp, Unknown
  Encodes 16S rRNA from Bacteroides
agagtttgatcctggctcaggatgaacgctagctacaggcttaacacatgcaagtcgaggggcagcatggaagtagcttgctacttccgatggcgaccggcgaatgggtgagtaacgcgtatccaacctgccgtgtgctcatggatagcccttagaaatgaggattaatacatgatggtctcctttgatcgcctgagattgggagtaaagattcatcggcacacg

SEQ ID NO: 154 - DNA, 225 bp, Unknown
  Encodes 16S rRNA from Prevotella
agagtttgatcctggctcaggatgaacgctagctacaggcttaacacatgcaagtcgaggggcagcatgacggtagcttgctactgttgatggcgaccggcgcacgggtgagtaacgcgtatccaaccttcccacaaataaggaatagcccggtgaaaatcgaattaataccttatgtggtcataagaggacatctgattatgattaaagatttatcgtttgtgg

SEQ ID NO: 155 - DNA, 225 bp, Unknown
  Encodes 16S rRNA from Corynebacterium
agagtttgatcctggctcaggacgaacgctggcggcgtgcttaacacatgcaagtcgaacggtaaggctccagcttgctggggtacacgagtggcgaacgggtgagtaacacgtgggtgacctgccctgcacttcgggataagcctgggaaactgggtctaataccggataggactgcaccgtgagggtgtggtggaaagttttttcggtgtgggatgggcccgc

SEQ ID NO: 156 - DNA, 225 bp, Unknown
  Encodes 16S rRNA from Atopobium
agagtttgatcctggctcaggatgaacgctggcggcgcgcttaacacatgcaagtcgaacggttaaagccccttcgggggtgtataaagtggcgaacggctgagtaacacgtgggcaacctacccccctctttgggatagcctcgggaaaccgggaataataccgaatactccggacacaccgcatgatgtgaccgggaaagctccggcggagagggatgggccc

SEQ ID NO: 157 - DNA, 225 bp, Unknown
  Encodes 16S rRNA from unknown taxa
agagtttgatcctggctcaggatgaacgctggcggcatgcttaacacatgcaagtcgaacgggaagtggtgtttccagtggcgaacgggtgagtaacgcgtaagaacctgcccttgggaggggaacaacaactggaaacggttgctaataccccgtaggctgaggagcaaaaggagaaatccgcccaaggaggggctcgcgtctgattagctagttggtgaggca

SEQ ID NO: 158 - DNA, 225 bp, Unknown
  Encodes 16S rRNA from Prevotella
agagtttgatcatggctcaggatgaacgctagctacaggcttaacacatgcaagtcgcggggcagcatggaggttgcttgcaacctctgatggcgaccggcgcacgggtgagtaacgcgtatccaacctgccctgcggtagggaacagcccggcgaaagtcggattaatgccctatgtgctcatttgaaggcatctgattttgagcaaaggatttattcgccaca

SEQ ID NO: 159 - DNA, 225 bp, Unknown
  Encodes 16S rRNA from Roseburia
agagtttgatcatggctcaggatgaacgctggcggcgtgcctaacacatgcaagtcgaacgagagaggaaggtgcttgcaccgaccaatcgagtggcggacgggtgagtaacgcgtgggtaacctgcctcatacagggggataacaactggaaacggttgataataccgcataagcgcacagcatcgcatgatgcagtgtgaaaaactccggtggtatgagatgg

SEQ ID NO: 160 - DNA, 225 bp, Unknown
  Encodes 16S rRNA from Prevotella
agagtttgatcctggctcaggatgaacgctagctacaggcttaacacatgcaagtcgcggggcagcatggaggttgcttgcaacctctgatggcgaccggcgcacgggtgcgtaacgcgtatccaacctgccccttactctggaatagcccggcgaaagtcggattaatgccggatgttgtcagacgaggacatctgaatctgaccaaaggcccgaaagggttgg

SEQ ID NO: 161 - DNA, 225 bp, Unknown
  Encodes 16S rRNA from Prevotella
agagtttgatcctggctcaggatgaacgctagctacaggcttaacacatgcaagtcgaggggtagcgtgagagaagcttgcttctcttgacgacgaccggcgaatgggtgagtaacgcgtatccaacctgcccttatctcaaggatagcccttagaaatgaggattaaaacttgatagtttccattgaccgcatgggtgatggaataaagatttattggataagg

SEQ ID NO: 162 - DNA, 225 bp, Unknown
  Encodes 16S rRNA from Eubacterium
agagtttgatcctggctcaggattaacgctggcggcgtgcctaacacatgcaagtcgagcgagaaatagtgaagagatacttcggttgaacagatctatggacagcggcggacgggtgagtaacgcgtgggcaacctgcccctttccggaggatagccaagggaaactttgaataatactccataaagcagagatgtcgcatggcaattctgccaaagatttatc

SEQ ID NO: 163 - DNA, 225 bp, Unknown
  Encodes 16S rRNA from Rhodocista
agagtttgatcatggctcagaacgaacgctggcggcaggcttaacacatgcaagttgaacggtatgttgagtgcttgcacttagcagagagtagcgcactggtgagtaacacgtgggaacatgccctaaagtacgggatagcgtctggaaacggacgataatacggtatacgccctgagggggaaagatttatcgctttaggattggcccgcggcagattaggta

SEQ ID NO: 164 - DNA, 225 bp, Unknown
  Encodes 16S rRNA from Prevotella
agagtttgatcatggctcaggatgaacgctagctacaggcttaacacatgcaagtcgaggggtaacatgattggagcttgctccgattgatgacgaccggcgcacgggtgcgtaacgcgtatccaaccttccccctaccagggaatagcccgttgaaagacggattaatgccctatgttgtgtgataatggcatcagagttacacgaaagactttgtcggtatgg

SEQ ID NO: 165 - DNA, 225 bp, Unknown
  Encodes 16S rRNA from Clostridium XlVa
agagtttgatcctggctcaggatgaacgctggcggcgtgcctaacacatgcaagtcgaacggagctgcgacgctgaggagtggagtacttgtacaaagcgaatcttgtcgtagcttagtggcggacgggtgagtaacgtgtggataacctggtccatccagggggatagcagctggaaacggctggtaataccgcataagcgcacagtagggcatcctacggtgt

SEQ ID NO: 166 - DNA, 225 bp, Unknown
  Encodes 16S rRNA from Prevotella
agagtttgatcctggctcaggatgaacgctagctacaggcttaacacatgcaagtcgaggggcagcatgtcgtgtgcttgcacacgatgatggcgaccggcgcacgggtgagtaacgcgtatccaacctgcccatgactccgggatagcccgctgaaaagcggattaacaccggatgcggtcgaacgaggacatctgatttcgaccaaagcttcggcggtcatgg

SEQ ID NO: 167 - DNA, 225 bp, Unknown
  Encodes 16S rRNA from Prevotella
agagtttgatcctggctcaggatgaacgctagctacaggcttaacacatgcaagtcgaggggcagcatgtcgtgtgcttgcacacgatgatggcgaccggcgcacgggtgagtaacgcgtatccaacctgcccatgaccccgggatagcccgctgaaaagcggattaacaccggatggggtcgaacgaggacatctgatttcgaccaaagcttcggcggtcatgg

SEQ ID NO: 168 - DNA, 225 bp, Unknown
  Encodes 16S rRNA from unknown taxa
agagtttgatcatggctcaggatgaacgctggcggcatgccttacacatgcaagtcggacgggaagtggtgtttccagtggcggacgggtgagtaacgcgtaagaacctacccttgggaggggaacaacagctggaaacggctgctaataccccgtaggctgaggagcaaaaggaggaatccgcccgaggaggggctcgcgtctgattagctagttggtgaggca

SEQ ID NO: 169 - DNA, 225 bp, Unknown
  Encodes 16S rRNA from Ochrobactrum
agagtttgatcatggctcagaacgaacgctgtcgacatgctttacacatgcaagtcttacgggtataacttgttataccagtggcaaacgggtgagtaatacgtagaaatgtacccaatagtcttgaataacaattggaaacgattgataatacaagatattatggtaacataaaaggtttagtaataaactgctattggagcagtctacggtggattagattgt

SEQ ID NO: 170 - DNA, 225 bp, Unknown
  Encodes 16S rRNA from Mogibacterium
agagtttgatcatggctcaggatgaacgctggcggcgtgcctaatacatgcaagtcgagcgagaatctcctttgaagcgttttcggacaattctgtggagaggaaagcggcggacgggtgagtaacgcgtaggcaacctgcccttagcagagggatagccattggaaacgatgattaaaacctcataatgctgaagagtcacatgtctcttcagccaaagattta

SEQ ID NO: 171 - DNA, 225 bp, Unknown
  Encodes 16S rRNA from Adlercreutzia
agagtttgatcctggctcaggatgaacgctggcggcgtgcttaacacatgcaagtcgaacggttaaaccgccttcgggcggacatagagtggcgaacgggtgagtaacacgtgaccaacctgccccgcgcaccgggacagccccccgaaagggggattaataccggatactccggcggccccgcatggggcggccgggaaggctccggcggcgcgggatggggtc

SEQ ID NO: 172 - DNA, 225 bp, Unknown
  Encodes 16S rRNA from Prevotella
agagtttgatcctggctcaggatgaacgctagctacaggcttaacacatgcaagtcgaggggtaacgtgagagaagcttgcttctcttgacgacgaccggcgaatgggtgagtaacgcgtatccaacctgccgcacgcccgggaacagcccttggaaacgaggattaaatcccgataccttgtgagctcgcatgagcatacaagaaaacaggcatgcgatgggga

SEQ ID NO: 173 - DNA, 225 bp, Unknown
  Encodes 16S rRNA from Riemerella
agagtttgatcctggctcaggatgaacgctagcgggaggcctaacacatgcaagccgagcggtagaaagtagcttgctacttttgagagcggcgtacgggtgcgtaacacgtgtgcaacctgcctttatctggggaatagcctttcgaaaggaagattaatgctccataacatattgaatggcatcatttaatattgaaagctccggcggatagagatgggcacg

SEQ ID NO: 174 - DNA, 225 bp, Unknown
  Encodes 16S rRNA from Prevotella
agagtttgatcctggctcaggatgaacgctagctacaggcttaacacatgcaagtcgaggggtaacaggagggaagcttgctttcctcgctgacgaccggcgaatgggtgagtaacgcgtatccaacctgccgcacgcccgggaacagcccttggaaacgaggattaaatcccgataccttgcccttccgcatgaaggggcaagaaaacaggcatgcgatgggga

SEQ ID NO: 175 - DNA, 225 bp, Unknown
  Encodes 16S rRNA from Roseburia
agagtttgatcatggctcaggatgaacgctggcggcgtgcttaacacatgcaagtcgaacgaggtttgagcggaagcccttcgggacggaagcttttaccgagtggcggacgggtgagtaacgcgtgggtaacctgccctgtactgggggacaacagttggaaacgactgctaataccgcataagcgcacgggatcgcatggtcttgtgtgaaaaactccggtgg

SEQ ID NO: 176 - DNA, 225 bp, Unknown
  Encodes 16S rRNA from Slackia
agagtttgatcctggctcaggatgaacgctggcggcgcgcctaacacatgcaagtcgaacggtgatactttcttcggaaagaggatcagtggcgaacgggtgagtaacgcgtgggtaacctgcccttgacacagggatagcaaagggaaacttttggtaatacctgatgacctcaaaaagtgacatctctttttgagcaaagaatttcggtcgaggatggacccg

SEQ ID NO: 177 - DNA, 225 bp, Unknown
  Encodes 16S rRNA from Clostridium IV
agagtttgatcatggctcaggacgaacgctggcggcgtgcctaacacatgcaagtcgaacggagttattagagtgaagttttcggatggaatgataataacttagtggcggacgggtgagtaacgcgtgagtaacctgcccatgagagggggataacgttctgaaaagaacgctaataccgcataacatatttagttcgcatggactgaatatcaaaggagcgat

SEQ ID NO: 178 - DNA, 225 bp, Unknown
  Encodes 16S rRNA from Syntrophococcus
agagtttgatcatggctcaggatgaacgctggcggcgtgcctaacacatgcaagtcgagcggaaccataaagaagcttgctttttaatggtttagcggcggatgggtgaggaacgcgtgggcaacctgcccttcacagggggataacagctggaaacggctgttaataccgcatatgctcacgatgccgcatggcattgggaggaaaactccggtggtgaaggat

SEQ ID NO: 179 - DNA, 225 bp, Unknown
  Encodes 16S rRNA from Prevotella
agagtttgatcctggctcaggatgaacgctagctacaggcttaacacatgcaagtcgaggggtaacgtgagagaagcttgcttctcttgacgacgaccggcgaatgggtgagtaacgcgtatccaacctgccgcacgcccgggaacagcccttggaaacgaggattaaatcccgataccttatcgttccgcatggagtgataagaaaacaggcatgcgatgggga

SEQ ID NO: 180 - DNA, 225 bp, Unknown
  Encodes 16S rRNA from Treponema
agagtttgatcatggctcagaatgaacgctggcggcgggtcttaagcatgcaagtcggacggcaagggagtgcttgcactcccctagagtggcggactggtgaggaacacgttggtgacgtaccctttggatggggatagccggtagaaataccgggtaataccgaataaggtcggtggtctcggaagccaccgaggaaagcagcttcggctgcgccgaaggaac

SEQ ID NO: 181 - DNA, 225 bp, Unknown
  Encodes 16S rRNA from Prevotella
agagtttgatcatggctcaggatgaacgctagctacaggcttaacacatgcaagtcgcggggcagcatgttgtgtgcttgcacacaatgatggcgaccggcgcacgggtgcgtaacgcgtatccaacctgccccttactctggaatagcccggcgaaagtcggattaatgccggatgttgtcagatgaggacatctgagtttgaccaaaggcttctgccggtaag

SEQ ID NO: 182 - DNA, 225 bp, Unknown
  Encodes 16S rRNA from Anaerovorax
agagtttgatcctggctcaggatgaacgctggcggcgtgcctaacacatgcaagtcgagcgagaaacctttgattgacgcttcggttgatttcaaaggcggaaagcggcggacgggtgagtaacgcgtaggcaacctgccccttgcagagggatagcctcgggaaaccgggattaaaacctcataatgctgatcctacacatgtttgatcagccaaagatttatc

SEQ ID NO: 183 - DNA, 225 bp, Unknown
  Encodes 16S rRNA from Prevotella
agagtttgatcctggctcaggatgaacgctagctacaggcttaacacatgcaagtcgaggggcagcatgaatcaagcttgcttgatttgatggcgaccggcgcacgggtgcgtaacgcgtgtccaacctacccaccgctcagggatagcccatcgaaagatgaattaatacctgatgttgtatgggaatcacatggcttccatactaaagatttatcggcgatgg

SEQ ID NO: 184 - DNA, 225 bp, Unknown
  Encodes 16S rRNA from Methanobrevibacter
agagtttgatcatggcagaagctactgctattgggattcgattaagccatgcaagtcgaacgaatttagattcgtggcgtacggctcagtaacacgtggataacctacccttaggaccgggataaccctgggaaactggggctaatactggatagatgatttttcctggaatggttttttgtttaaatgttttttcgcctaaggatgggtctgcggcagattagg

SEQ ID NO: 185 - DNA, 225 bp, Unknown
  Encodes 16S rRNA from Corynebacterium
agagtttgatcatggctcaggacgaacgctggcggcgtgcttaacacatgcaagtcgaacggaaaggccctgcttgcagggtactcgagtggcgaacgggtgagtaacacgtgggtgatctgccctgcacttcgggataagcctgggaaactgggtctaataccggataggaccatcgtttagtgtcggtggtggaaagtttttcggtgcaggatgagctcgcgg

SEQ ID NO: 186 - DNA, 225 bp, Unknown
  Encodes 16S rRNA from Clostridium XlVa
agagtttgatcatggctcaggatgaacgctggcggcgcgcctaacacatgcaagtcgaacggagcatcattaatgagactttcgggtggatttgatgatgacttagtggcggacgggtgagtaacgcgtggggaacctgccctgtacagggggacaacagccggaaacagctgctaataccgcataagcgcacagtgccgcatggtacagtgtgaaaagccgaga

SEQ ID NO: 187 - DNA, 166 bp, Unknown
  Encodes 16S rRNA from Alkaliphilus
agagtttgatcatggctcaggatgaacgctggcggcgtgcctaacacatgcaagtcgagcgagaatcagggaaatgaagcttcggtagattggaactgaggacagcggcggacgggtgagtaacgcgtgggcaacctgccccttactggtggatagccgcggtaat

SEQ ID NO: 188 - DNA, 225 bp, Unknown
  Encodes 16S rRNA from Ruminococcus
agagtttgatcatggctcaggacgaacgctggcggcacgcctaacacatgcaagtcgaacggacgagaaggagcttgcttcttcaagttagtggcggacgggtgagtaacacgtgagcaacctgcctttaagagagggatagcttctggaaacggatggtaatacctcataacacatcgggaccgcatgattctgatgtcaaagatttatcgcttaaagatgggc

SEQ ID NO: 189 - DNA, 225 bp, Unknown
  Encodes 16S rRNA from Clostridium XlVa
agagtttgatcatggctcaggatgaacgctggcggcgtgcttaacacatgcaagtcgaacggaacttattgaatgaagttttcggatggattttgataagtttagtggcggacgggtgagtaacgcgtgggtaacctgccctgtacagggggataacagttagaaatgactgttaataccgcataagaccacagtgccgcatggcacaggggtaaaagctgcgac

SEQ ID NO: 190 - DNA, 225 bp, Unknown
  Encodes 16S rRNA from Eubacterium
agagtttgatcatggctcaggatgaacgctggcggcgtgcctaacacatgcaagtcgagcgagaagagaatgacctattcttcggatgaagccattctcggacagcggcggacgggtgagtaacacgtaggaaacctgccctttactgggggatagccgagggaaacttcgagtaataccccataacgcgttatgatcgcatgatcgaaacgccaaagatttatc

SEQ ID NO: 191 - DNA, 225 bp, Unknown
  Encodes 16S rRNA from Bacteroides
agagtttgatcctggctcaggatgaacgctagctacaggcttaacacatgcaagtcgaggggcagcatgaacttagcttgctaagtttgatggcgaccggcgcacgggtgagtaacacgtatccaacctgcccatgactcagggatagccctctgaaaggaggattaatacctgatgcggttgactggggacatcccctttcaaccaaagattcatcggtcatgg

SEQ ID NO: 192 - DNA, 225 bp, Unknown
  Encodes 16S rRNA from Roseburia
agagtttgatcctggctcaggatgaacgctggcggcgtgcctaacacatgcaagtcgaacggacccatggaaaagattagcttgctatgattttccggaaggttagtggcggacgggtgagtaacgcgtgggtaacctgcctcatacagggggatagcagttggaaacgactggtaataccgcataagcgcacagtaccgcatggtacagtgtgaaaaactccgg

SEQ ID NO: 193 - DNA, 225 bp, Unknown
  Encodes 16S rRNA from Lentisphaera
agagtttgatcctggctcagaatgaacgctggcggcatggattaggcatgcaagtcgaacgagaaagcccgcaagggcgagtaaagtggcgaaagggtgagtaacacgtgagcaacctgcccccgagaccggaacaagcctgggaaaccgggtctgaaaccggatgaggaccgggaaggcatcttcccgcctccaaacattcatggctcggggatgggctcgcgg

SEQ ID NO: 194 - DNA, 225 bp, Unknown
  Encodes 16S rRNA from Eubacterium
agagtttgatcctggctcaggattaacgctggcggcgtgcctaacacatgcaagtcgagcgagaattaaatgaatgattcttcggatgaattcgtttaaggacagcggcggacgggtgagtaacgcgtgggcaacctgcccctttccggaggatagccaagggaaactttgaataatactccataaagcatttttgccgcatgacagagatgccaaagatttatc

SEQ ID NO: 195 - DNA, 225 bp, Unknown
  Encodes 16S rRNA from Roseburia
agagtttgatcatggctcaggatgaacgctggcggcgtgcctaacacatgcaagtcgagcggaccttagagagtgaacagcttgctgggatctttcgaaaggttagcggcggacgggtgagtaacgcgtgggtaacctgcctcatacagggggatagcagttggaaacgactggtaataccgcataagcgcacagtaccgcatggtacggtgtgaaaaactccgg

SEQ ID NO: 196 - DNA, 225 bp, Unknown
  Encodes 16S rRNA from Clostridium IV
agagtttgatcatggctcaggatgaacgctggcggcatgcctaacacatgcaagtcgaacggagttattagacggaagccttcgggtggaagattaataacttagtggcggacgggtgagtaacgcgtgagtaacctgcctctcagagggggataacgttctgaaaagaacgctaataccgcatataatcaagaaaccgcatgattttttgatgaaaggagcaat

SEQ ID NO: 197 - DNA, 215 bp, Unknown
  Encodes 16S rRNA from Hahella
agagtttgatcatggctcaggatgaacgctagctacaggcttaacacatgcaagtcgaggggaaaccctgatgcagccatgccgcgtgtgtgaagaaggccttcgggttgtaaagcacttttgcattcgaggaagacagcgtataaataaatgcgctatttgacgttagagtgtgaataagcaccggcaaactccgtgccagcagccgcggtaat

SEQ ID NO: 198 - DNA, 225 bp, Unknown
  Encodes 16S rRNA from Butyricicoccus
agagtttgatcatggctcaggataaacgctggcggcgtgcataacacattcaagtcgaacggacgatacgagaaacttcggttttttgtaaagttagtggcggacgggtgagtaacgcgtgagcaatctgcctttgatagagggataacacatggaaacgtgtgctaataccgcataacgttaaagaaccgcatgattctttaaccaaagctccggcgatcaaag

SEQ ID NO: 199 - DNA, 225 bp, Unknown
  Encodes 16S rRNA from Clostridium IV
agagtttgatcatggctcaggacgaacgctggcggcgtgcctaacacatgcaagtcgagcggacttgtatttggaaagtgcttgcaccggaagaatacaagttagcggcggacgggtgagtaacgcgtgagcaacctgtcctctacagggggataagatctcgaaagggattctaataccgcatgagaccacagcagggcatcctgcgggggtcaaaggaggaat

SEQ ID NO: 200 - DNA, 225 bp, Unknown
  Encodes 16S rRNA from Prevotella
agagtttgatcatggctcaggatgaacgctagctacaggcttaacacatgcaagtcgcggggcagcatgggagttgcttgcaatttccgatggcgaccggcgcacgggtgcgtaacgcgtatccaacctacccgcaagtcagggccagcccggcgaaagtcggattaatccctgatgtggtgcgaagaggacatctgattcacattaaaggagcgatttgcttgc

SEQ ID NO: 201 - DNA, 225 bp, Unknown
  Encodes 16S rRNA from Clostridium IV
agagtttgatcatggcttaggatgaacgctggcggcgtgcataacacattcaagtcgaacggtgaagggacttcggtcccggatcagtggcggacgggtgagtaacgcgtgagcaacctgccctgcagtgcgggataacagagggaaacttctgctaataccgcatatagcatcggaaccgcatgattccggtatgaaagatttattgctgcaggatgggctcgc

SEQ ID NO: 202 - DNA, 225 bp, Unknown
  Encodes 16S rRNA from Desulfovibrio
agagtttgatcctggctcagattgaacgctggcggcgtgcttaacacatgcaagtcgaacgcgaaaggggcttcggccccgagtagagtggcgcacgggtgagtaacgcgtggataatctgcccctgcaactggaatagcgactggaaacggtcgataataccggatacgcccttgtcttacaatgaggggaaaggagacctctgcttgcaagtttccgtgcagg

SEQ ID NO: 203 - DNA, 225 bp, Unknown
  Encodes 16S rRNA from Sphingobacterium
agagtttgatcatggctcaggatgaacgctagcggcaggcctaatacatgcaagtcgaacgggatctatgagtaagcttgcttacttttagtgagagtggcgcacgggtgcgtaacgcgtgagcaacctacccatatcagggggatagcccggagaaatccggattaacaccgcatgacacagcaattcggcatcgaatcactgttaaatatttataggatatgg

SEQ ID NO: 204 - DNA, 225 bp, Unknown
  Encodes 16S rRNA from Roseburia
agagtttgatcctggctcaggatgaacgctggcggcgtgcctaacacatgcaagtcgagcggacctgattaagtgaatagcttgctatgaacttatgactggttagcggcggacgggtgagtaacgcgtgggtaacctgcctcatacagggggatagcagttggaaacgactggtaataccgcataagcgcacagtaccgcatggtacagtgtgaaaaactccgg

SEQ ID NO: 205 - DNA, 225 bp, Unknown
  Encodes 16S rRNA from Bacteroides
agagtttgatcctggctcaggatgaacgctagcgacaggcctaacacatgcaagtcgaggggcagcatgagagtagcaatacttttgatggcgaccggcgcacgggtgcgtaacaggtgtgcaatctgtccataatcggggaatagcccgccgaaaggtgaattaacgctccatgtgtaatgaagaggcatctctttattatgaaacgtaaggattatgggtgag

SEQ ID NO: 206 - DNA, 225 bp, Unknown
  Encodes 16S rRNA from Ruminococcus
agagtttgatcatggctcaggacgaacgctggcggcacgcctaacacatgcaagtcgaacggtgtttatcagcttgctggtaaacatagtggcggacgggtgagtaacacgtgagcaacctgccttcaagagagggatagcttctggaaacggatggtaataccttataatatatactggccgcatgaccggtatatcaaacgaattttgcttgaagatgggctc

SEQ ID NO: 207 - DNA, 225 bp, Unknown
  Encodes 16S rRNA from Prevotella
agagtttgatcatggctcaggatgaacgctagcggcaggcttaacacatgcaagtcgaggggcatcgggtccagcaatggatgccggcgaccggcgaaagggtgagtaacgcgtgagcaacgtgcccgtctgagggggatagtcattggaaacgatgcgtaataccccgtaacaacagtcaccgcatggtgggtgtttgaaagatttattgcagacggatcggct

SEQ ID NO: 208 - DNA, 225 bp, Unknown
  Encodes 16S rRNA from Asteroleplasma
agagtttgatcctggctcaggataaacgccggcggcgtgcctaatacatgcaagtcgaacgaggctcttcggagccgagtggcgtacgggtgagtaacacgttggtaacctgccctccagaccggaataccagagagaaatctctgctaatgccggatgacgtcatatggtcgcaagaccacttgaccaaaggcggcaactgccgcgctgaaggatggacctgcg

SEQ ID NO: 209 - DNA, 225 bp, Unknown
  Encodes 16S rRNA from Syntrophococcus
agagtttgatcatggctcaggatgaacgctggcggcgtgcctaacacatgcaagtcgagcggacttatgatgagattcttcggatgatttttataagttagcggcggatgggtgaggaacgcgtggagaacctgcccttcacagggggataacagttggaaacgactgttaataccgcatatgctcacgcgaccgcatggtcgagtgaggaaagctccggcggtg

SEQ ID NO: 210 - DNA, 225 bp, Unknown
  Encodes 16S rRNA from Victivallis
agagtttgatcatggctcagaatgaacgctggcggcatggattaggcatgcaagtcgaacgccccggtccctcgggtccggggagtggcgaaagggtgcgcaacgcgtggggaacccgcccccgggcccgggacaagcgctggaaacggcgtctaataccggatggaggggccgccggcatcggcggctgccgaaagtcttctcgcccggggagggccccgcgtc

SEQ ID NO: 211 - DNA, 225 bp, Unknown
  Encodes 16S rRNA from Lachnobacterium
agagtttgatcctggctcaggatgaacgctggcggcgtgcttaacacatgcaagtcgaacgaagcacctggtcacgatcccttcggggtgacgaccttgtgactgagtggcggacgggtgagtaacgcgtgggaaacctgccatgtactgggggataacagttggaaacggctgctaataccgcataacactgttggatcgcatgatccgatagccaaaactccg

SEQ ID NO: 212 - DNA, 225 bp, Unknown
  Encodes 16S rRNA from Lachnospiracea incertae sedis
agagtttgatcatggctcaggatgaacgctggcggcgtgcttaacacatgcaagtcgaacgaagctcttacgacagatctcttcggagtgaagatgtttgagactgagtggcggacgggtgagtaacgcgtgggtaacctgcctcatagagggggacaacagttggaaacgactgctaataccgcatagtaagaaagaaccgcatgattttttcttgaaagcttt

SEQ ID NO: 213 - DNA, 225 bp, Unknown
  Encodes 16S rRNA from Clostridium IV
agagtttgatcatggctcaggatgaacgctggcggcgtgcataacacattcaagtcgaacggacgccttcgggcgccagtggcggacgggtgagtaacgcgtgaggaacctgccgcggattggggaataacgaccggaaacagtcgctaataccgcataacgcacagaggccgcatgacctttgtgccaaagatttatcgatccgcgatggactcgcgtccaatt

SEQ ID NO: 214 - DNA, 225 bp, Unknown
  Encodes 16S rRNA from Anaerorhabdus
agagtttgatcctggctcaggataaacgctggcggcgtgcctaatacatgcaagtcggacgaggattgagacttcggttttaatccgagtggcgaacgggtgagtaaaacgtaagcaacctgcctacaaggaccgggataacacctggaaacgggcgctaaaaccggataggcaataagggggcatcctcatattgttaaaggtgagaaacacaagtagatgggc

SEQ ID NO: 215 - DNA, 225 bp, Unknown
  Encodes 16S rRNA from Altererythrobacter
agagtttgatcatggctcagaacgaacgctggcggcatgcttaacacatgcaagtcgaacggtgttttctagtacttgtattaggaaacatagtggcaaacgggtgagtaacgcgtgggaatgtaccctttggtattgaataacgtctggaaacggacgctaatacaatataagctcgagagaggaaagagaaatcgctgaaggagtagcccgcgttagattagg

SEQ ID NO: 216 - DNA, 225 bp, Unknown
  Encodes 16S rRNA from Clostridium XlVa
agagtttgatcatggctcaggatgaacgctggcggcgtgcctaacacatgcaagtcgaacggagaaagatgcttcggtatctttcttagtggcggacgggtgagtaacgcgtgggtaacctgccccatacaggggaacaacagctggaaacggctgctaataccgcataagcgcacggtaccgcatggtacagtgtgaaaagattgtatcggtatgggatggacc

SEQ ID NO: 217 - DNA, 225 bp, Unknown
  Encodes 16S rRNA from Clostridium XlVa
agagtttgatcctggctcaggatgaacgctggcggcgtgcctaacacatgcaagtcgaacggaacttttattaatggagattcgtcaaagttgatttaagtttagtggcggacgggtgagtaacgcgtgggtaacctgcctcatagagggggataacggctggaaacgaccgctaataccgcataagcccacagtaccgcatggtacagggggaaaagatttatc

SEQ ID NO: 218 - DNA, 225 bp, Unknown
  Encodes 16S rRNA from Proteiniclasticum
agagtttgatcatggctcaggacgaacgctggcggtatgcctaacacatgcaagtcgaacgaaaaacgagggcttgctctcgtttttagtggcgcacgggtgagtaacgcgtgagtaatctgccttaaagtgggggacaacatttggaaacgaatgctaataccgcgtaatatacagttttcgcatggattttgtattatagatttatcgctttaagatgagctc

SEQ ID NO: 219 - DNA, 225 bp, Unknown
  Encodes 16S rRNA from Bifidobacterium
agagtttgatcctggctcaggacgaacgctggcggcgtgcttaacacatgcaagtcgaacgggatcctgcaagcttgcttgcgggtgagagtggcgaacgggtgagtaatgcgtgaccaacctgccccattctccggaatagctcctggaaacgggtggtaatgccggatgctccgccccctcgcatggggggtcgggaaggcttttgcggaatgggatggggtc

SEQ ID NO: 220 - DNA, 225 bp, Unknown
  Encodes 16S rRNA from Clostridium XlVa
agagtttgatcctggctcaggatgaacgctggcggcgtgcctaacacatgcaagtcgagcggagtgaatcgagtgcttgcacatgattcacttagcggcggatgggtgaggaacgcgtggagaacctgcctcacacagggggataacagttggaaacgactgttaataccgcatatgctcacggtaccgcatggtacagggaggaaagatttatcggtgtgagat

SEQ ID NO: 221 - DNA, 225 bp, Unknown
  Encodes 16S rRNA from Clostridium XlVa
agagtttgatcctggctcaggatgaacgctggcggcgtgcctaacacatgcaagtcgaacgaagttgtttccacccgacagattatcttcggatatgaagtcaccggaaacgcttagtggcggacgggtgagtaacgcgtgggcaacctgccctacacagggggatagcggttggaaacgaccggtaataccgcatacctttattttgccgcatgacagaataaa

SEQ ID NO: 222 - DNA, 225 bp, Unknown
  Encodes 16S rRNA from Desulfovibrio
agagtttgatcatggctcaggacaaacgctggcggcgtgcctaacacatgcaagtcgaacgagcccttcggggctagtggcagacgggtgagtaacgcgtaggtaatgtacctcttcgctggggataccgttccgaaaggaacgttaataccgaatgaattcatcgggcggcatcgcttgatgaataaaccgcaagggcgaggagatcagcttgcgtactatcag

SEQ ID NO: 223 - DNA, 225 bp, Unknown
  Encodes 16S rRNA from Clostridium XlVa
agagtttgatcatggctcaggatgaacgctggcggcgtgcctaacacatgcaagtcgaacggcggatgcatttcggtgtatctgcagtggcggacgggtgagtaacgcgtgggtaatctgccctgtacaggggaatagcagttggaaacgactgataaaaccgcataagcacacaggaccgcatggtcccgggtgaaaaactccggtggtacaggatgagcccgc

SEQ ID NO: 224 - DNA, 225 bp, Unknown
  Encodes 16S rRNA from Nitrobacter
agagtttgatcatggctcagagcgaacgctagcggaatgctttatacatgcaagtcgaacgaatgagtttatattgagtagcaatacgatttataaatgagttagtggcgaacgggtgagtaatagataggaacttgccgagtagtgggggacaacagatagaaatgtctgctaataccgcatacgcccgagaggggaaagatttatcgctatttgagaggccta

SEQ ID NO: 225 - DNA, 225 bp, Unknown
  Encodes 16S rRNA from Enterorhabdus
agagtttgatcctggctcaggatgaacgctggcggcgtgcttaacacatgcaagtcgaacggttaaaccggcttcggccggacatacagtggcgaacgggtgagtaacacgtgaccaacctgccccgcgctccgggacagccccccgaaagggggattaataccgggtactccgggaggggcgcatgccccgcccgggaaagcccaggcggcgcgggatggggtc

SEQ ID NO: 226 - DNA, 225 bp, Unknown
  Encodes 16S rRNA from Clostridium sensu stricto
agagtttgatcctggctcaggacgaacgctggcggcgtgcttaacacatgcaagtcgagcggggataatgagacggaaggcttcggccggaagacttattattctagcggcggacgggtgagtaacgcgtgaatgatctgtctcttacagggggataacacttggaaacaggtgctaataccgcataagaccacggggctgcatggccttgaggtaaaaggagcg

SEQ ID NO: 227 - DNA, 225 bp, Unknown
  Encodes 16S rRNA from Oscillibacter
agagtttgatcctggctcaggacgaacgctggcggcgtgcctaacacatgcaagtcgaacgggacttattggaatgagacttcggtcaaaggaaaataagtttagtggcggacgggtgagtaacgcgtgagcaacctgcctttcagagggggacaacagttggaaacgactgctaataccgcataacgtacagaggaggcatcttccctgtaccaaagatttatc

SEQ ID NO: 228 - DNA, 225 bp, Unknown
  Encodes 16S rRNA from Nautilia
agagtttgatcatggctcagagttaacgctggcggcgtgcctaacacatgcaagtcgagcgaattcttacagagtatcgtaagagttagcggcaaacgggtgagtaacacatgggaaacctcccttagaatggggaatatctccgtgaaaacggagctaataccgcataagaccacagtttggcatcaaacaggggtaaaagcagcaatgcgttctaagatggtc

SEQ ID NO: 229 - DNA, 225 bp, Unknown
  Encodes 16S rRNA from Corynebacterium
agagtttgatcctggctcaggacgaacgctggcggcgtgcttaacacatgcaagtcgaacggaaaggccctgcttgcagggtactcgagtggcgaacgggtgagtaacacgtgggtgatctgccctgcacttcgggataagcctgggaaactgggtctaataccggataggaccatcgtttagtgtcggtggtggaaagtttttcggtgcaggatgagctcgcgg

SEQ ID NO: 230 - DNA, 225 bp, Unknown
  Encodes 16S rRNA from Ruminococcus
agagtttgatcatggctcaggacgaacgctggcggcacgcctaacacatgcaagtcgagcggtgaattttggatttattcgagattcatagcggcggacgggtgagtaacacgtgagcaacctacctctaagtgagggatagcttctggaaacggatggtaataccttataatatatatttatcacatgatagatatatcaaagatttattgcttagagatgggc

SEQ ID NO: 231 - DNA, 225 bp, Unknown
  Encodes 16S rRNA from Coprococcus
agagtttgatcctggctcaggatgaacgctggcggcgtgcctaacacatgcaagtcgaacgaagtgtcatttcttcggaggtaacacttagtggcggacgggtgagtaacgcgtgggtaacctgcctcatacagggggatagcagttggaaacgactgataataccgcataagcgcacagcatcgcatggtgcagtgtgaaaaactccggtggtatgagatggac

SEQ ID NO: 232 - DNA, 225 bp, Unknown
  Encodes 16S rRNA from Eubacterium
agagtttgatcatggctcaggattaacgctggcggcgtgcctaacacatgcaagtcgagcgagaaatagtgaagagattcttcggatgaacagatctatggacagcggcggacgggtgagtaacgcgtgggcaacctgcccctttccggaggatagccaagggaaactttgaataatactccataaagcagagatgtcgcatggcaattctgccaaagatttatc

SEQ ID NO: 233 - DNA, 225 bp, Unknown
  Encodes 16S rRNA from Rikenella
agagtttgatcctggctcaggatgaacgctagcggcaggcttaacacatgcaagtcgaggggcagcgagttgtagcaatacaatgtcggcgaccggcggaagggtgcgtaacgcgtgagcaacatgcccgtatctgggggataggagatggaaacgtcttataataccccataacaacagaggctgcatggcctttgtttgaaagattcattggatacggattgg

SEQ ID NO: 234 - DNA, 225 bp, Unknown
  Encodes 16S rRNA from Clostridium XlVa
agagtttgatcctggctcaggatgaacgctggcggcgtgcctaacacatgcaagtcgagcggacttaagaaaagaatcttcggatgaaatttttaagttagcggcggatgggtgaggaacgcgtggagaacctgcccttcacagggggataacagctggaaacggctgttaataccgcatatgctcacggagccgcatggccccgggaggaaagctccggcggtg

SEQ ID NO: 235 - DNA, 225 bp, Unknown
  Encodes 16S rRNA from Paenibacillus
agagtttgatcatggctcaggatgaacgctggcggcgtgcttaatacatgcaagtcgaacggatgagttttctagcttgctagaagatgattcagtggcgaacgggtgagtaatacgtaggcaacctgccccaaagcgggggatagcagttggaaacgactattaataccgcataggtaatcttaaggcatcttgagattattaaaggtgcgtttgcaccgctgt

SEQ ID NO: 236 - DNA, 225 bp, Unknown
  Encodes 16S rRNA from Ruminococcus
agagtttgatcatggctcaggacgaacgctggcggcacgcctaacacatgcaagtcgaacggtagatacttagcttgctttgtatctatagtggcggacgggtgagtaacacgtgagcaacctgcctctgagagagggatagcttctggaaacggatggtaatacctcatgacatagtgtcttcgcatggagatgctatcaaacgaatctcgctcagagatgggc

SEQ ID NO: 237 - DNA, 225 bp, Unknown
  Encodes 16S rRNA from Prevotella
agagtttgatcctggctcaggatgaacgctagctacaggcttaacacatgcaagtcgaggggcagcatggggatggcttgccattcccgatggcgaccggcgcacgggtgagtaacgcgtatccaacctgcccgcaaccgcggaatagcccgccgaaaggcggattaatgccgcatgagctcgcgtgaggacatctgcccgcgagcaaaggttcgttccggttgc

SEQ ID NO: 238 - DNA, 225 bp, Unknown
  Encodes 16S rRNA from Haematobacter
agagtttgatcatggctcagaacgaacgctggcggcaggcctaacacatgcaagtcgagcgagatcttcggatctagcggcggacgggtgagtaacgcgtgggaacgtaccctttgcttcggaatagcctcgggaaactgggagtaataccgaatgtgccctacgggggaaagatttatcggcaaaggatcggcccgcgttggattaggtagttggtgaggtaat

SEQ ID NO: 239 - DNA, 225 bp, Unknown
  Encodes 16S rRNA from Prevotella
agagtttgatcctggctcaggatgaacgctagctacaggcttaacacatgcaagtcgaggggcatcatgggggttgtttacaatccctgatggcgaccggcgcacgggtgagtaacgcgtatccaacctgccttcgagtcagggataaccttccgaaagggagcctaatacctgatgcagtgcgatgatggcatcagaattgcactaaagctttagcgctcggag

SEQ ID NO: 240 - DNA, 225 bp, Unknown
  Encodes 16S rRNA from Clostridium XlVa
agagtttgatcctggctcaggatgaacgctggcggcgtgcctaacacatgcaagtcgaacggagatatcacggatgaaggattcgtctgaattctgttttatcttagtggcggacgggtgagtaacgcgtggagaacctgcctctttccgggggatagcagttggaaacgactggtaataccgcatgagcgcacagtaccgcatggtacggggtgaaaagattta

SEQ ID NO: 241 - DNA, 225 bp, Unknown
  Encodes 16S rRNA from Lachnospiracea incertae sedis
agagtttgatcctggctcaggatgaacgctggcggcgtgcttaacacatgcaagtcgagcgaagcgctttggaagattccttcgggatgaatcctttgtgacttagcggcggacgggtgagtaacgcgtgggcaacctgccttgtacagggggataacagttagaaatgactgctaataccgcataagcgcacagcatggcatcatgcagtgcgaaaaactccgg

SEQ ID NO: 242 - DNA, 164 bp, Unknown
  Encodes 16S rRNA from Enterorhabdus
agagtttgatcatggctcaggatgaacgctggcggcgtgcctaacacatgcaagtcgaacgaagcacttttgcattcgaggaagacagcacgtaaataaacgtgttatttgacgttagagtgtgaataagcaccggcaaactccgtgccagcagccgcggtaat

SEQ ID NO: 243 - DNA, 225 bp, Unknown
  Encodes 16S rRNA from Blautia
agagtttgatcatggctcaggatgaacgctggcggcgtgcctaacacatgcaagtcgaacggagattcattggaaataagcttcggcagaaataagatggatcttagtggcggacgggtgagtaacgcgtggagaacctgccctgtacagggggataacatccagaaatggatgctaaaaccgcataagcgcacatgaccgcatggtcaagtgtgaaaaactccg

SEQ ID NO: 244 - DNA, 225 bp, Unknown
  Encodes 16S rRNA from Sporobacter
agagtttgatcatggctcaggatgaacgctggcggcgtgcctaacacattcaagtcgaacggagaagggacttcggtcccggatcagtggcggacgggtgagtaacgcgtgagcaacctgcctttgcccgggggataacagccggaaacagctgctaataccgcataacgtacggacgccgcatgacgaccgtaccaaagatttattgggcaaagatgggctcgc

SEQ ID NO: 245 - DNA, 225 bp, Unknown
  Encodes 16S rRNA from Oscillibacter
agagtttgatcatggctcaggacgaacgctggcggcgtgcctaacacatgcaagtcgaacgggacttaatggaatgagacttcggtcaaaggaagttaagtttagtggcggacgggtgagtaacgcgtgagcaacctgcctttcagagggggacaacagttggaaacgactgctaataccgcataacgtacggaggaggcatctttttcgtaccaaagatttatc

SEQ ID NO: 246 - DNA, 225 bp, Unknown
  Encodes 16S rRNA from Clostridium XlVa
agagtttgatcctggctcaggatgaacgctggcggcgtgcctaacacatgcaagtcgaacggggatagagagaagttttcggacagacctttatcttagtggcggacgggtgagtaacgcgtggataacctgcctttttctgggggatagcagttggaaacgactgataataccgcataagctccgattcccgcatgggagccggaggaaagatttatcgggaga

SEQ ID NO: 247 - DNA, 225 bp, Unknown
  Encodes 16S rRNA from Atopobium
agagtttgatcatggctcaggatgaacgctggcggcgcgcctaacacatgcaagtcgaacggttaaagccccttcgggggtgtataaagtggcgaacggctgagtaacacgtgggcaacctacctcttgctctgggatagcctcgagaaatcgtgggtaataccggatactccgtaaccgtcgcatggcggatacgggaaagcgcatacggcaagagatgggccc

SEQ ID NO: 248 - DNA, 225 bp, Unknown
  Encodes 16S rRNA from Sporobacter
agagtttgatcatggcttaggatgaacgctggcggcgtgcataacacattcaagtcgaacgatgaacggacttcggtccgggattagtggcggacgggtgagtaacgcgtgagcaacctgccccggagtgagggataacagacggaaacatctgctaatacctcatatagcatcgggttcgcatgtacctggtatgaaaggtttactgctccgggatgggctcgc

SEQ ID NO: 249 - DNA, 225 bp, Unknown
  Encodes 16S rRNA from Clostridium XlVa
agagtttgatcctggctcaggatgaacgctggcggcgtgcctaacacatgcaagtcgaacggggtgtccgatcttcggactggacacttagtggcggacgggtgagtaacgcgtgggtaacctgcctcatacagggggatagcagttggaaacgactgataataccgcataagcgcacagcatcgcatgatgcagtgtgaaaaactccggtggtatgagatggac

SEQ ID NO: 250 - DNA, 225 bp, Unknown
  Encodes 16S rRNA from unknown taxa
agagtttgatcatggctcaggatgaacgctggcggcgtgtttaaggcatgcaagtcgaatgggtttagacccatggcaaacgggagagtaatactttggtaatttaccccttagtcgtgaataactattcgaaagattagataatacacgatggtctcaaagaactcgagttttttgagtaaagatttatcgctaagggagaagcctaaggactatcagctagtt

SEQ ID NO: 251 - DNA, 225 bp, Unknown
  Encodes 16S rRNA from Oscillibacter
agagtttgatcatggctcaggatgaacgctggcggcgtgcctaacacatgcaagtcgaacggagcttaatggaaggagacttcggtcaacggaagataagcttagtggcggacgggtgagtaacgcgtgagcaacctgcctcagagtgggggacaacagctggaaacggctgctaataccgcataaaattgttagaaggcatcttctgataatcaaagcttaatg

SEQ ID NO: 252 - DNA, 225 bp, Unknown
  Encodes 16S rRNA from Clostridium XlVa
agagtttgatcatggctcaggatgaacgctggcggcgtgcttaacacatgcaagtcgaacgaggtttaagacttcggttttaaaccgagtggcggacgggtgagtaacgcgtgggtaacctgccgtatgcagggggacaacagttagaaatgactgctaataccgcataagcttacagtatcgcatgatacagtgagaaaagatttatcggcatacgatggaccc

SEQ ID NO: 253 - DNA, 225 bp, Unknown
  Encodes 16S rRNA from Clostridium IV
agagtttgatcctggctcaggacgaacgctggcggtatgcttaatacatgcaagtcgaacggagcttagcggaagcttgcttctgcgaaagcttagtggcggacgggtgagtaacgcgtgagtaacctgccttaaagagggggataacacagagaaatttgtgctaataccgcataatgtagcgaagccgcatgactttgctaccaaaggtcagccgctttaaga

SEQ ID NO: 254 - DNA, 225 bp, Unknown
  Encodes 16S rRNA from Mogibacterium
agagtttgatcatggctcaggatgaacgctggcggcgtgcctaatacatgcaagtcgagcgagaatctcttcagaagcgttttcggacaattccgaggagaggaaagcggcggacgggtgagtaacgcgtaggcaacctgcccttagcagagggatagccattggaaacgatgattaaaacctcataatgccatctttacacatgtttagatggccaaagattta

SEQ ID NO: 255 - DNA, 225 bp, Unknown
  Encodes 16S rRNA from Roseburia
agagtttgatcatggctcaggatgaacgctggcggcgtgcttaacacatgcaagtcgaacgaatttttttctgaaggaagcttcggcagacggaaggaagaagtgagtggcggacgggtgagtaacgcgtgggtaacctgcctcacattgggggataccagtcggaaacgactgctaataccgcataagaccacggcaccgcatggtgctgtggccaaaactccg

SEQ ID NO: 256 - DNA, 225 bp, Unknown
  Encodes 16S rRNA from Lachnospiracea incertae sedis
agagtttgatcctggctcaggatgaacgctggcggcgtgcttaacacatgcaagtcgagcgaagcgctctggaagattcctttgggatgattccttagtgacttagcggcggacgggtgagtaacgcgtgggcaacctgccttgtacagggggataacagttagaaatgactgctaataccgcataagcgcacagcatggcatcatgcagtgtgaaaaactccgg

SEQ ID NO: 257 - DNA, 225 bp, Unknown
  Encodes 16S rRNA from Pelotomaculum
agagtttgatcatggctcaggacgaacgctggcggcgtgcctaacacatgcaagtcgaacggagattaagatttcggttttaatctgagtggcgaacgggtgagtaacgcgtgagcaacctgcccttcagagggggataaccgctggaaacagcagctaataccgcataagaccacagcccggcatcggggaggggtcaaaggagcaatccgctgaaggaggggc

SEQ ID NO: 258 - DNA, 225 bp, Unknown
  Encodes 16S rRNA from Pelotomaculum
agagtttgatcctggctcaggacgaacgctggcggcgtgcctaacacatgcaagtcgaacggagcaggggacttcggttctctgctgagtggcgaacgggtgagtaacgcgtgagcaacctgaccttgagagggggataacgacgggaaactgtcgctaataccgcatgagaccacagcccggcatcggggaggggtcaaaggagaaatccgctgaaggaggggc

SEQ ID NO: 259 - DNA, 225 bp, Unknown
  Encodes 16S rRNA from Clostridium XlVa
agagtttgatcatggctcaggatgaacgctggcggcgtgcctaacacatgcaagtcgaacggagctgcgacgctgaggagtggagtacttgtacaaagcgaatcttgtcgtagcttagtggcggacgggtgagtaacgtgtggataacctggtccatccagggggatagcagctggaaacggctggtaataccgcataagcgcacagagaggcatctctcggtgt

SEQ ID NO: 260 - DNA, 225 bp, Unknown
  Encodes 16S rRNA from Robinsoniella
agagtttgatcctggctcaggatgaacgctggcggcacgcttaacacatgcaagtcgaacgagggaaaaggagcttgctcctttgacctagtggcggacgggtgcgtaacgcgtgggtaatctgccctgcacagggggataacgtatagaaatgtacgctaataccgcataagcccacagagtggcatcactcagggggaaaagcgaatacggtgcaggatgagc

SEQ ID NO: 261 - DNA, 225 bp, Unknown
  Encodes 16S rRNA from Coprococcus
agagtttgatcatggctcaggataaacgctggcggcgtgcttaacacatgcaagtcgaacggactgattaggtagcttgctacttatgaaagttagtggcggacgggtgagtaacgcgtgggtaacctgcctcacacagggggataacagttggaaacgactgttaataccgcataagcgcacaggatcgcatggtctagtgtgaaaaactccggtggtgtgaga

SEQ ID NO: 262 - DNA, 225 bp, Unknown
  Encodes 16S rRNA from Wautersiella
agagtttgatcctggctcaggatgaacgctagcgggaggcttaacacatgcaagccgaggggtatttgtggcttgctacaaagagaccggcgcacgggtgcgtaacgcgtatgcaacttgccctactgaaagggatagccttttgaaaagaagattaataccttataatagtgagactggcatcagtaacacttgaaagatttatcgcagtaggataggcatgcg

SEQ ID NO: 263 - DNA, 184 bp, Unknown
  Encodes 16S rRNA from Lachnospiracea incertae sedis
agagtttgatcatggctcaggatgaacgctggcggcgtgctttgcacaatgggggaaaccctgatgcagcgacgccgcgtgagtgatgaagtatttcggtacgtaaaactctatcagcagggaagaaaatgacggtacctgactaagaagcaccggctaaatacgtgccagcagccgcggtaat

SEQ ID NO: 264 - DNA, 225 bp, Unknown
  Encodes 16S rRNA from Planctomyces
agagtttgatcctggctcagaatgaacgttggcggcatggattaggcatgcaagtcgtacggtgaaggggagcttgctcctccgatcagtggcgaaagggatagtaacgcgtagacacctaccttctggacggggatagctgcgggaaactgcaggtaatacccgataatgacgagagtccaaaggtgtaattccttcagaagacggatctgcgtcctaccagat

SEQ ID NO: 265 - DNA, 225 bp, Unknown
  Encodes 16S rRNA from Treponema
agagtttgatcctggctcagaacgaacgctggcggcgcgtcttaagcatgcaagtcgagcgggaataagggagcttgcttccttatgagagcggcggactggtgagtaacacgtgggtaacgcaccctcctgacggggacagcctgtggaaacacagggtaataccggatgagatggacttctggaagggagttcatgaaaggagctacggctccgcagggggaa

SEQ ID NO: 266 - DNA, 225 bp, Unknown
  Encodes 16S rRNA from Coprococcus
agagtttgatcatggctcaggatgaacgctggcggcgtgcctaacacatgcaagtcgaacgagagagattggtgcttgcaccgatcaatcgagtggcggacgggtgagtaacgcgtgggtaacctgcctcatacagggggataacaactggaaacggttgataataccgcataagcgcacggtatcgcatgatacagtgtgaaaaactccggtggtatgagatgg

SEQ ID NO: 267 - DNA, 225 bp, Unknown
  Encodes 16S rRNA from Paracoccus
agagtttgatcctggctcagaacgaacgctggcggcaggcctaacacatgcaagtcgagcgaacccttcggggttagcggcggacgggtgagtaacgcgtgggaacgtgccctttgctacggaatagccccgggaaactgggagtaataccgtatacgcccttagggggaaagatttatcggcaagggatcggcccgcgttggattaggtagttggtggggtaat

SEQ ID NO: 268 - DNA, 225 bp, Unknown
  Encodes 16S rRNA from Ruminococcus
agagtttgatcatggctcaggacgaacgctggcggcacgcctaacacatgcaagtcgaacggtgaatgatcagtttactgaacattcatagtggcggacgggtgagtaacacgtgagcaacctgcctctgagagagggatagcttctggaaacggatggtaatacctcatgatatagcgttctcgcatgggaatgctatcaaaagaaattcgctcagagatgggc

SEQ ID NO: 269 - DNA, 225 bp, Unknown
  Encodes 16S rRNA from Atopobium
agagtttgatcatggctcaggatgaacgctggcggcgcgcctaacacatgcaagtcgaacggttaaagccccttcgggggtgtataaagtggcgaacggctgagtaacacgtgggcaacctacctcttgctctgggatagcctcgggaaaccgtgggtaataccggatactctgtaactgtcgcatggcggatacaggaaagcgcatacggcaagagatgggccc

SEQ ID NO: 270 - DNA, 225 bp, Unknown
  Encodes 16S rRNA from Prevotella
agagtttgatcctggctcaggatgaacgctagctacaggcttaacacatgcaagtcgaggggcagcatggaggtagcttgctatctccgatggcgaccggcgcacgggtgagtaacgcgtatccaaccttccctgaggtaggggacagcccggtgaaaaccggattaataccctatgttgtcacgataaggcatctgagcgtgacgaaagattcatcgcctcagg

SEQ ID NO: 271 - DNA, 225 bp, Unknown
  Encodes 16S rRNA from Clostridium IV
agagtttgatcatggctcaggatgaacgctggcggcgtgcctaacacattcaagtcgaacggtgaagggacttcggtcccggatcagtggcggacgggtgagtaacgcgtgagcaacctaccttcttgtgggggataacacagggaaacttgtgctaataccgcataacgtatctgacccgcatggggcggataccaaagatttattgcagggagatgggctcgc

SEQ ID NO: 272 - DNA, 225 bp, Unknown
  Encodes 16S rRNA from Clostridium XlVa
agagtttgatcatggctcaggatgaacgctggcggcgtgcctaacacatgcaagtcgagcggagttacattagcttgcttttgtaacttagcggcggatgggtgaggaacgcgtggataacctgcctcacactgggggataacagctggaaacggctgttaataccgcatatgctcacagtaccgcatggtacagggaggaaagatttatcggtgtgagatggat

SEQ ID NO: 273 - DNA, 225 bp, Unknown
  Encodes 16S rRNA from Clostridium XlVa
agagtttgatcctggctcaggatgaacgctggcggcgtgcctaacacatgcaagtcgagcggaggatcacattggaagccttcgggtggaagaagtgaaacttagcggcggacgggtgagtaacgcgtgggtaacctggctcatacagggggataacagagagaaatttctgctaataccgcataagcgcacagcaccgcatggtgcagtgtgaaaaactccggt

SEQ ID NO: 274 - DNA, 225 bp, Unknown
  Encodes 16S rRNA from Clostridium XlVa
agagtttgatcatggctcaggatgaacgctggcggcgtgcttaacacatgcaagtcgaacgaagcatttcggaatgcggcttcggccaaatgaagaactgacttagtggcggacgggtgagtaacgcgtgggtaacctgccttgtactgggggataacagttagaaatgactgctaataccgcataagcccacggtttcgcatggaactgtgagaaaagatttat

SEQ ID NO: 275 - DNA, 225 bp, Unknown
  Encodes 16S rRNA from Prevotella
agagtttgatcctggctcaggatgaacgctagctacaggcttaacacatgcaagtcgaggggcatcgagaagaaagcttgctttctttgtcggcgaccggcgcacgggtgagtaacgcgtatccaacctaccctttacactgggatagcccgttgaaaagcggattaataccagatgcagtcctttgcggacatctaagtaggacgaaaggtttttccggtagag

SEQ ID NO: 276 - DNA, 225 bp, Unknown
  Encodes 16S rRNA from Dethiosulfovibrio
agagtttgatcatggctcaggatgaacgctggcggcgtgcataacacattcaagtcgaacgaagcgccgggacggaacccttcggggggaagacccgatgacttagtggcggacgggtgagtaacgcgtgagcaacctgcctgcgatagagggataacaccgggaaaccggtgctaataccacatgacgcagcggggtcacatggccctgttgttaaagatttat

SEQ ID NO: 277 - DNA, 225 bp, Unknown
  Encodes 16S rRNA from Clostridium XI
agagtttgatcctggctcaggacgaacgctggcggcgtgcttaacacatgcaagtcgaacgaagatacggagcggaacccttcggggggaagatctgtagactgagtggcggacgggtgagtaacgcgtgagcaacctgcctacaagagggggacaacagctggaaacggctgctaataccgcataagaccacgctatcgcatggtagaggggtcaaagatttat

SEQ ID NO: 278 - DNA, 225 bp, Unknown
  Encodes 16S rRNA from Clostridium IV
agagtttgatcatggctcaggacgaacgctggcggcgtgcttaacacatgcaagtcgaacgaagttccgttgaatgagatttcggtcaaaggagacggacacttagtggcggacgggtgagtaacgcgtgagtaacctgcctttcagaggggaataacatttggaaacgaatggtaataccgcataacatcaaggagccgcatggcactttgatcaaaggagcaa

SEQ ID NO: 279 - DNA, 225 bp, Unknown
  Encodes 16S rRNA from Saccharofermentans
agagtttgatcatggctcaggatgaacgctggcggcgtgcctaacacattcaagtcgaacggagatatacggaagcttgcttttgtatattttagtggcggacgggtgagtaatgcatgagcaacctgccttaaagagggggataacacagagaaatttgtgctaataccgcataagctgcgaaggaggcatctcccatgcagaaaaggagcaatccgctttaag

SEQ ID NO: 280 - DNA, 225 bp, Unknown
  Encodes 16S rRNA from Clostridium sensu stricto
agagtttgatcatggctcaggacgaacgctggcggcgcgcctaacacatgcaagtcgaacggaacttttgagtgacttcggtctctcttgagtttagtggcggacgggtgagtaaagcatgagtaactttcccttgagtggggaataacttttggaaacagaagataataccgcatacttcaaaggatcgcatgatcttttggcaaagattttcgcttttggata

SEQ ID NO: 281 - DNA, 225 bp, Unknown
  Encodes 16S rRNA from Roseburia
agagtttgatcatggctcaggatgaacgctggcggcgtgcctaacacatgcaagtcgaacgaagcatagagattagatttcttcggattgaagatttttatgacttagtggcgaacgggtgagtaacgcgtgggtaacctgcctcatgcagggggataacaattagaaatgattgctaataccgcataagaccgcagaaccgcatggttgagcggccaaagattt

SEQ ID NO: 282 - DNA, 225 bp, Unknown
  Encodes 16S rRNA from Lachnospiracea incertae sedis
agagtttgatcctggctcaggatgaacgctggcggcgtgcttaacacatgcaagtcgaacgaagcacttacacttgatttcttcggattgaaagagtttgtgactgagtggcggacgggtgagtaacgcgtggataacctgcccttcacagggggataacagttagaaatgactgctaataccgcataagcgcacactaaggcatcttagggtgtgaaaagctcc

SEQ ID NO: 283 - DNA, 225 bp, Unknown
  Encodes 16S rRNA from unknown taxa
agagtttgatcatggctcaggatgaacgctagcagaatgcttaacacatgcaagtcgaacgaatcttcggattagtggcagacgagcgagtaacacgtacttaacttgcccttgagttgggaacaactatagagatatagctaattcccaatatgctcacgatggtgaaatcccgatgtgaggaaagatttatcgctcaaggagaggggtgcgtcctatcaggta

SEQ ID NO: 284 - DNA, 225 bp, Unknown
  Encodes 16S rRNA from Hydrogenoanaerobacterium
agagtttgatcatggctcaggacgaacgctggcggcgcgcctaacacatgcaagtcgaacgggattgtttacaatccagtggcggacgggtgagtaatgcatgagtaatctgcctgaaagagggggatagcttctggaaacagaagataataccgcatatttcaaaatttccgcatggtttttttggcaaaggagcaatccactttcagatgagctcatgtccga

SEQ ID NO: 285 - DNA, 225 bp, Unknown
  Encodes 16S rRNA from Victivallis
agagtttgatcatggctcagaacgaacgctggcggcatggattaggcatgcaagtcgaacgaagcagcaatgcttagtggcggaagggtgaggaacgcgtgagcaacctgccctcaagttgggaataacagttggaaacgactgctaataccgaatgtggcttttgaaccgcatggtttattggctaaagatttattgcttgaggatgggctcgcgtcccattag

SEQ ID NO: 286 - DNA, 225 bp, Unknown
  Encodes 16S rRNA from Clostridium IV
agagtttgatcatggctcaggacgaacgctggcggcgtgcctaacacatgcaagtcgaacggagttcttacagatgaagcttcggccgatgaagtttgaacttagtggcggacgggtgagtaacgcgtgagcaacctgccttacagagggggacaacagttggaaacgactgctaataccgcataacgtatttggagggcatcctctggataccaaagatttatc

SEQ ID NO: 287 - DNA, 225 bp, Unknown
  Encodes 16S rRNA from Pelotomaculum
agagtttgatcatggctcaggacgaacgctggcggcgtgcctaacacatgcaagtcgaacggagtaaagagcttcggttttttacttagtggcgaacgggtgagtaacgcgtgagcaacctgactctttgagggggataacagtcggaaacaactgctaataccgcataagaccacgaaccggcatcggtatgaggtcaaaggagcaatccgcagagagaggggc

SEQ ID NO: 288 - DNA, 225 bp, Unknown
  Encodes 16S rRNA from Clostridium XlVa
agagtttgatcatggctcaggatgaacgctggcggcgtgcctaacacatgcaagtcgaacgaagcacttctcccgtcaaagtagattagcttgctatgaagcggagacatttgaagtgacttagtggcggacgggtgagtaacgcgtgggtaacctgccctgtactgggggacaacagttggaaacggctgctaataccgcataagcgcacagcatcgcatggtg

SEQ ID NO: 289 - DNA, 225 bp, Unknown
  Encodes 16S rRNA from Saccharofermentans
agagtttgatcatggctcaggatgaacgctggcggcgtgcttaacacattcaagtcgaacgagcgaggggaagcaattccctttgctagtggcggacgggtgagtaacgcgtgagcaacctacctttacgagtgggataacaattggaaacgattgctaataccgcataacgtatagatatcgcatgacatttataccaaagaaaatcgcgtaaagatgggctcg

SEQ ID NO: 290 - DNA, 225 bp, Unknown
  Encodes 16S rRNA from Lachnospiracea incertae sedis
agagtttgatcatggctcaggatgaacgctggcggcgtgcctaacacatgcaagtcgaacgggaaccttgtgacggagacttcggtcaaagatgcaagaattctagtggcggacgggtgagtaacgcgtgggtaacctgcccttaagaggcgaataacagtgagaaatcactgctaatacgccatatgcttacggaatcgcatgattttgtgaggaaaagaattt

SEQ ID NO: 291 - DNA, 225 bp, Unknown
  Encodes 16S rRNA from Coprococcus
agagtttgatcctggctcaggatgaacgctggcggcgtgcttaacacatgcaagtcgaacgaagcacttacgattgactggagagcttgctcgaagggattttgtttgtgacttagtggcggacgggtgagtaacgcgtgggtaacctgcctcatacagggggataacagttggaaacgactgttaataccgcataagcgcacggtatcgcatgatacagtgtga

SEQ ID NO: 292 - DNA, 225 bp, Unknown
  Encodes 16S rRNA from Clostridium XlVa
agagtttgatcatggctcaggatgaacgctggcggcgtgcttaatacatgcaagtcgaacgaggaattgcgattgaagttttcggatggatttcgcttttccgagtggcggacgggtgagtaacgcgtgggtaacctgccttacacagggggacaacagctggaaacggctgctaataccgcataacccgctagagtcgcatgactcagacggaaaagatttatc

SEQ ID NO: 293 - DNA, 225 bp, Unknown
  Encodes 16S rRNA from Clostridium XlVb
agagtttgatcatggctcaggatgaacgctggcggcgtgcttaacacatgcaagtcgagcgaaggacaaagagcttgctctttgttacttagcggcggacgggtgagtaacgtgtgggcaatctgccctatgcagaggaataacatagagaaatttatgctaatgcctcataaactcttagtactgcatggtacatagagaaaagatttatcggcataggaggag

SEQ ID NO: 294 - DNA, 225 bp, Unknown
  Encodes 16S rRNA from Papillibacter
agagtttgatcatggctcaggatgaacgctggcggcgtgcctaacacattcaagtcgaacggacgagagggggcttgctccctcaagttagtggcggacgggtgagtaacgcgtgagcaacctgccttttttcgggggataacacggggaaaccggtgctaataccgcataacgtaccgagaccgcatgatcatggtaccaaaggagcaatccgaggaaagatgg

SEQ ID NO: 295 - DNA, 225 bp, Unknown
  Encodes 16S rRNA from Bartonella
agagtttgatcctggctcagaacgaacgctgtcgacatgcttaacacatgcaagtcgtacgggtataacttgttataccagtggcaaacgggtgagtaatgcgtaggaatgtacccaatagtctcgaataacaattggaaacgattgataatacgagatacaatggaacatgggaccatgtgacatgaaaggttcagcaatggactgctataggagcagcctacg

SEQ ID NO: 296 - DNA, 225 bp, Unknown
  Encodes 16S rRNA from Clostridium IV
agagtttgatcatggctcaggatgaacgctggcggcgtgcttaacacattcaagtcgaacgagcgagaggaagcaattccttttgctagtggcggacgggtgagtaacgcgtgagcaacctacctttgtgagtgggataacaattggaaacgattgctaataccgcataacgtatagatattgcatgataactataccaaagaaattcgcacaaagatgggctcg

SEQ ID NO: 297 - DNA, 225 bp, Unknown
  Encodes 16S rRNA from Eubacterium
agagtttgatcatggctcaggattaacgctggcggcgtgcctaacacatgcaagtcgagcgagaattaaagaaatgattcttcggatgaatttctttaaggacagcggcggacgggtgagtaacgcgtgggcaacctgcccctttccggaggatagccaagggaaactttgaataatactccataaagcatttttgccgcatgacagagatgccaaagatttatc

SEQ ID NO: 298 - DNA, 225 bp, Unknown
  Encodes 16S rRNA from Asaccharobacter
agagtttgatcctggctcaggatgaacgctggcggcgtgcttaacacatgcaagtcgaacgggaaagcgccctcgggcgcgagtacagtggcgaacgggtgagtaacacgtgaccaacctgccccccgcaccgggatagccgggcgaaagcccgggtaataccggatgaccccgcaccgcggcatcgcggcgcgggcaaagcccagacggcgggggatggggtcg

SEQ ID NO: 299 - DNA, 225 bp, Unknown
  Encodes 16S rRNA from Clostridium IV
agagtttgatcatggctcaggatgaacgctggcggcgtgcataacacattcaagtcgaacggactgatttgatagcttgctattgatgaaagttagtggcggacgggtgagtaacgcgtgagcaacctgcccctatgtgcgggataacgtttggaaacggacgctaataccgcataatccaatggaatcgcatggttttattggcaaagatttattgcataggga

SEQ ID NO: 300 - DNA, 225 bp, Unknown
  Encodes 16S rRNA from Blautia
agagtttgatcatggctcaggatgaacgctggcggcgtgcctaacacatgcaagtcgaacggagcttattttttggagacttcggtcaaagaagcttaagcttagtggcggacgggtgagtaacgcgtggagaacctgccctgtaccgggggataacagccggaaacggctgctaataccgcataagcgcacgaggccgcatggccctgtgtgaaaaactccggt

SEQ ID NO: 301 - DNA, 225 bp, Unknown
  Encodes 16S rRNA from Prevotella
agagtttgatcatggctcaggatgaacgctagctacaggcttaacacatgcaagtcgaggggcatcactggggtggcttgccatccctggtggcgaccggcgcacgggtgagtaacgcgtatccaacctgccccgaaccgcggtatagcccgccgaaaggcggattaatcccgcatgtggtcgtgagatgacatctgaccacgactaaaggtattttccggttcg

SEQ ID NO: 302 - DNA, 225 bp, Unknown
  Encodes 16S rRNA from Ruminococcus
agagtttgatcatggctcaggacgaacgctggcggcacgcttaacacatgcaagtcgaacgaattagtttcaccgtagcttgctacaccgagactaattagtggcggacgggtgagtaacacgtgagcaatctgcctttcagagggggataccagttggaaacgactgttaataccgcataacatatgtttaccgcatgatagacatatcaaagatttatcgctg

SEQ ID NO: 303 - DNA, 150 bp, Unknown
  Encodes 16S rRNA from Selenomonas
agagtttgatcatggctcaggatgaacgctagctacaggcttaacacatgcaagtcgaggggacgaatgttgaggcctagaacataggtttcaaatgacggtacctgacgaggaagccacggctaactacgtgccagcagccgcggtaat

SEQ ID NO: 304 - DNA, 225 bp, Unknown
  Encodes 16S rRNA from Treponema
agagtttgatcatggctcagaacgaacgctggcggcgcgtcttaagcatgcaagtcgaacgggatccacgcgcttgcgcgtggtgagagtggcggactggtgagtaacgcgtaggtgacgtaccctccggacggggatagcccttagaaataaggggtaataccggatacggttccgtgtgtcagaggcacggaaggaaaggagcttcggctccgccgggggatc

SEQ ID NO: 305 - DNA, 225 bp, Unknown
  Encodes 16S rRNA from Adlercreutzia
agagtttgatcatggctcaggatgaacgctggcggcgtgcttaacacatgcaagtcgaacgattaaagccccttcgggggtgtatagagtggcgaacgggtgagtaacacgtgagcaacctacctctcacaccgggataacatatggaaacgtatgctaataccggatactccggaacttacgcatgttcgttccgggaaagctccgacggtgagagatgggctc

SEQ ID NO: 306 - DNA, 225 bp, Unknown
  Encodes 16S rRNA from Butyricicoccus
agagtttgatcatggctcaggacgaacgctggcggcgtgcctaacacatgcaagtcgaacggaactattttgactgattccttcgggatgaagaatttttagtttagtggcgatcggtagccggactgagaggttgaacggccacattgggactgagacacggcccagactcctacgggaggcagcagtgggggatattgcgcaatgggggcaaccctgacgcag

SEQ ID NO: 307 - DNA, 225 bp, Unknown
  Encodes 16S rRNA from Pseudoflavonifractor
agagtttgatcatggctcaggacgaacgctggcggcgtgcttaacacatgcaagtcgaacgaggaatgttgaaaagcttgctttttaacatttcgagtggcggacgggtgagtaacgcgtgaggaacctgtcttctacagggggataacgtcccgaaagggacgctaataccgcataagaccacggtatcgcatgatacaggggtcaaaggagcaatccggtaga

SEQ ID NO: 308 - DNA, 225 bp, Unknown
  Encodes 16S rRNA from Corynebacterium
agagtttgatcctggctcaggacgaacgctggcggcgtgcttaacacatgcaagtcgaacggtaaggccccagcttgctggggtacacgagtggcgaacgggtgagtaacacgtgggtgacctgccccgcacttcgggataagcctgggaaactgggtctaataccggataggaccgcaccgtgagggtgtggtggaaagtttttcggtgtgggatgggcccgcg

SEQ ID NO: 309 - DNA, 225 bp, Unknown
  Encodes 16S rRNA from Adlercreutzia
agagtttgatcatggctcaggatgaacgctggcggcgtgcttaacacatgcaagtcgaacggttaaagccccttcgggggtgtataaagtggcgaacgggtgagtaacacgtgagcaacctacctctcacaccgggataacaactggaaacggttgataataccggatactccgattggatcgcatgttcctttcgggaaagctccgacggtgagagatgggctc

SEQ ID NO: 310 - DNA, 225 bp, Unknown
  Encodes 16S rRNA from Selenomonas
agagtttgatcctggctcaggacgaacgctggcggcgtgcttaacacatgcaagtcgaacgagacgattgaaagcttgcttttgagagtcgagtggcaaacgggtgagtaacgcgtagacaacctgccgcaaagatggggacaacagtccgaaaggactgctaataccgaatgttgtgcaatctccgcatggaggatgcattaaagatggcctctacttgtaagc

SEQ ID NO: 311 - DNA, 225 bp, Unknown
  Encodes 16S rRNA from Coraliomargarita
agagtttgatcatggctcagagtgaacgctggcgacgtggctaagacatgcaagtcgagcgagaaggtgccttcgggtgccggaaagcggcaaacgggtgcgtaacacgtaagtaacctgcccttaagacgggaatagcttgatgaaaattgagataatgcccgatatcgaattcttccgcatgggagaagtttgaaaggtttgtgatgacgcttaaggaggggc

SEQ ID NO: 312 - DNA, 225 bp, Unknown
  Encodes 16S rRNA from Paraprevotella
agagtttgatcatggctcaggatgaacgctagcggcaggcttaacacatgcaagtcgaggggcagcgagtcggtagcaatactgatgtcggcgaccggcgcacgggtgagtaacgcgtatgcaacctttcccagacagggggatagcccagggaaacttggattaataccccgtaggccagaggagggcatcctcgtctggttaaagttccggcggtctggggtg

SEQ ID NO: 313 - DNA, 225 bp, Unknown
  Encodes 16S rRNA from Oscillibacter
agagtttgatcatggctcaggacgaacgctggcggcgtgcctaacacatgcaagtcgaacgggacttattggaatgagacttcggtcaaaggaaaataagtttagtggcggacgggtgagtaacgcgtgagcaacctgcctttcagagggggacaacagttggaaacgactgctaataccgcataacgtgtattggaggcatcttcggtacaccaaagatttatc

SEQ ID NO: 314 - DNA, 225 bp, Unknown
  Encodes 16S rRNA from Anaerovorax
agagtttgatcatggctcaggatgaacgctggcggcgtgcctaacacatgcaagtcgagcgagaaacctttgattgacacttcggttgatttcaaaggcggaaagcggcggacgggtgagtaacgcgtaggcaacctgccccttgcagagggatagcctcgggaaaccgggattaaaacctcataacaccgaacctacacatgttcgatcggtcaaagatttatc

SEQ ID NO: 315 - DNA, 225 bp, Unknown
  Encodes 16S rRNA from Clostridium XlVa
agagtttgatcctggctcaggatgaacgctggcggcgtgcataacacatgcaagtcgaacggagttacattgaaacctagtgatatgtaacttagtggcggacgggtgagtaacgcgtgggtaacctacctggtattgggggacaacagttagaaatgactgctaataccgcatacgtcatcgagagggcatcctcttgatgagaaaggagcaatccgacatcag

SEQ ID NO: 316 - DNA, 225 bp, Unknown
  Encodes 16S rRNA from Saccharofermentans
agagtttgatcatggctcaggacgaacgctggcggcgtgcctaacacatgcaagtcgagcggagtaagtggagagcttgcttgaaacttacttagcggcggacgggtgagtaacgcgtgagcaacctgtcctctgcagggggataagacagcgaaagttgttctaataccgcatgagaccacaacgtcacatggcgaaggggtcaaaggaggaatccggcagagg

SEQ ID NO: 317 - DNA, 225 bp, Unknown
  Encodes 16S rRNA from Erysipelothrix
agagtttgatcatggctcaggatgaacgctggcggcgtgcctaatacatgcaagtcgaacggggtaccttcgggtacctagtggcgaacgggtgagtaacacataaacaatctgccctggagactgggataccgtcgggaaaccgacgctaataccggataggcagtaagggggcatctccatactgttaaagctgggttgcagcgctgcaggatgagtttatgt

SEQ ID NO: 318 - DNA, 225 bp, Unknown
  Encodes 16S rRNA from Agaricicola
agagtttgatcatggctcagaacgaacgctggcggcaggcttaatccatgcaagtcaagggggtgtagcaatacacaaccggcgtacgggtgagtaacgcgtgggaatgtgtccatttgtggggaatagcttctggaaacggaaggtaataccgcatacgcccttcgggggaaagatttatcgcagatggagcggcccgcgttagattagctagttggtggggta

SEQ ID NO: 319 - DNA, 225 bp, Unknown
  Encodes 16S rRNA from Denitrobacterium
agagtttgatcatggctcaggatgaacgctggcggcgtgcctaacacatgcaagtcgaacgaataacccgccttcgggcggtcatagagtggcgaacgggtgagtaacacgtgaccaaccttccccccgcatggggataaccgggcgaaagcccggctaatacccaatactccgggccctccgcatggaggggccgggaaagcccaggcggcgggggatggggtc

SEQ ID NO: 320 - DNA, 225 bp, Unknown
  Encodes 16S rRNA from unknown taxa
agagtttgatcatggctcaggacgaacgctagcgacgtgcctaagaaatgcaagtcgagcgatgacggtggcttcggctgcctgattagcggcgaacggtcgcgtaacacgtaagcaatctgccccaaagtttgggatagccatccgaaaggatgattaataccggatgtggaatatatatcgcatgttatatattctaaagtagcgatacgctttgggatgagc

SEQ ID NO: 321 - DNA, 225 bp, Unknown
  Encodes 16S rRNA from Asaccharobacter
agagtttgatcctggctcaggatgaacgctggcggcgtgcttaacacatgcaagtcgaacgattaaaccggcttcggccggatatagagtggcgaacgggtgagtaacacgtgaccaacctgccccccgcttcgggataactgctggaaacggcagctaataccggatactccttcagcaccgcatggtgctccagggaaagatttatcggcgagggatggggtc

SEQ ID NO: 322 - DNA, 225 bp, Unknown
  Encodes 16S rRNA from Anaeroplasma
agagtttgatcatggctcaggattaacgctggcggcatgcctaatacatgcaagtcgaatgaattagattcatggcgaacgggtgagtaacacgtaggtaatctaccataaagacaaggataaccattggaaacgatggataagactcgataggacacgaagtcgcatgactttgtgtttaaaggttacgctttatgaggagcctgcggtgcattagctagttgg

SEQ ID NO: 323 - DNA, 225 bp, Unknown
  Encodes 16S rRNA from Prevotella
agagtttgatcctggctcaggatgaacgctagctacaggcttaacacatgcaagtcgaggggcagcatgacggtagcttgctatcgttgatggcgaccggcgcacgggtgagtaacgcgtatccaaccttcccatgactccggttcagcccgccgaaaggcggattactcccggatggtttccgaagagggcctctgatttggaataaagattcatcggtcatgg

SEQ ID NO: 324 - DNA, 225 bp, Unknown
  Encodes 16S rRNA from Lachnospiracea incertae sedis
agagtttgatcctggctcaggatgaacgctggcggcgtgcttaacacatgcaagtcgaacgaggaactgtgaatgaaattttcggatggatttcgcttttccgagtggcggacgggtgagtaacgcgtggataacctgcccttcacagggggacaacagtcggaaacgactgctaataccgcataagccgacggagtcgcatgactcagccggaaaagatttatc

SEQ ID NO: 325 - DNA, 225 bp, Unknown
  Encodes 16S rRNA from Clostridium IV
agagtttgatcatggctcaggacgaacgctggcggcgtgcctaacacatgcaagtcgagcggacttatagatagaaagtgcttgcactggacatttacaagttagcggcggacgggtgagtaacgcgtgagcaacctgtcctctacagggggataagatctcgaaagggattctaataccgcatgagaccacagcagggcatcctgcgggggtcaaaggaggaat

SEQ ID NO: 326 - DNA, 225 bp, Unknown
  Encodes 16S rRNA from Streptococcus
agagtttgatcctggctcaggacgaacgctggcggcgtgcctaatacatgcaagtagaacgctgaagactttagcttgctaaagttggaagagttgcgaacgggtgagtaacgcgtaggtaacctgcctactagcgggggataactattggaaacgatagctaataccgcataacagcatttaacccatgttagatgcttgaaaggagcaattgcttcactagta

SEQ ID NO: 327 - DNA, 166 bp, Unknown
  Encodes 16S rRNA from Cellulosilyticum
agagtttgatcatggctcaggatgaacgctggcggcgtgcttaacacatgcaagtcgaacggagtttaagaaggttttcggattgtaaactcctgtttcgagggacgataatgacggtacctcgggaggaagctccggctaactacgtgccagcagccgcggtaat

SEQ ID NO: 328 - DNA, 225 bp, Unknown
  Encodes 16S rRNA from Asaccharobacter
agagtttgatcctggctcaggatgaacgctggcggcgtgcttaacacatgcaagtcgaacgattaaagcgccttcgggcgtgtatagagtggcgaacgggtgagtaacacgtgatcaacctacctcgtacttcgggatagcctcgtgaaaacgggattaataccggatactccgattaaatcgcatgattctttcgggaaagcctttacggtacgagatgggatc

SEQ ID NO: 329 - DNA, 225 bp, Unknown
  Encodes 16S rRNA from Enterorhabdus
agagtttgatcctggctcaggatgaacgctggcggcgtgcctaacacatgcaagtcgaacggttaaaccggcttcggccggaaataaagtggcgaacgggtgagtaacacgtgaccaacctgccccgcgcaccgggacagccccccgaaagggggattgataccggatactccgccgggcccgcatgggcccggcgggaaagctccggcggcgcgggatggggtc

SEQ ID NO: 330 - DNA, 225 bp, Unknown
  Encodes 16S rRNA from Treponema
agagtttgatcctggctcagaacgaacgctggcggcgcgtcttaagcatgcaagtcgagcgggattcatgtgcttgcacatgatgagagcggcggactggtgagtaacacgtaggtgacgtaccttgaggacggggacagccggcagaaatgccgggtaataccggataagctcgcgcgagccggaatcgcgcgaggaaaggagctaaggctccgcctctagagc

SEQ ID NO: 331 - DNA, 225 bp, Unknown
  Encodes 16S rRNA from Roseburia
agagtttgatcctggctcaggatgaacgctggcggcgtgcctaacacatgcaagtcgaacggagcacattaagcgagaccttcgggtggaactttttatgcttagtggcggacgggtgagtaacgcgtgggtaacctgccttatacagggggataacagagagaaatttctgctaataccccataagcgcacagtatcgcatgatacagggtgaaaaggatttcc

SEQ ID NO: 332 - DNA, 225 bp, Unknown
  Encodes 16S rRNA from Victivallis
agagtttgatcctggctcagaacgaacgctggcggcatggattaggcatgcaagtcgaacgaagcagcaatgcttagtggcggaagggtgaggaacgcgtgagtaatctgccctcaagttgggaataacagctggaaacggctgctaataccgaatgtggctgcaagaccgcatgattttgcagttaaagatttattgcttgaggatgagctcgcgtcccattag

SEQ ID NO: 333 - DNA, 225 bp, Unknown
  Encodes 16S rRNA from Prevotella
agagtttgatcatggctcaggatgaacgctagctacaggcttaacacatgcaagtcgcggggcatcatgaagggagcttgctctctttgatggcgaccggcgcacgggtgagtaacgcgtatccaacctgccccctagtagggaacagcccgtagaaatgcggattaatgccctatgttctccgaagacggcatcagattcggagcaaaggcctttggccgctag

SEQ ID NO: 334 - DNA, 225 bp, Unknown
  Encodes 16S rRNA from Roseburia
agagtttgatcctggctcaggatgaacgctggcggcgtgcttaacacatgcaagtcgaacggagatatcggcttcggctgatatctcagtggcggacgggtgagtaacgcgtgggtaacctgccttacaccgggggacaacagttggaaacgactgctaataccgcataagaccacggagccgcatggccctggggtaaaagatttatcgatgtaagatggaccc

SEQ ID NO: 335 - DNA, 225 bp, Unknown
  Encodes 16S rRNA from Ruminococcus
agagtttgatcctggctcaggacgaacgctggcggcacgcctaacacatgcaagtcgaacggtgaatgattagcttgctagacattcatagtggcggacgggtgagtaacacgtgagcaacctgcctctgagagagggatagcttctggaaacggatggtaatacctcatgatatagcattctcgcatgggaatgctatcaaatgaatttcgctcagagatgggc

SEQ ID NO: 336 - DNA, 225 bp, Unknown
  Encodes 16S rRNA from Mogibacterium
agagtttgatcatggctcaggatgaacgctggcggcgtgcctaatacatgcaagtcgagcgagaaatctttcagacgattcttcggatgagtcaggaagatggaaagcggcggacgggtgagtaacgcgtaggcaacctgccctcagcagagggatagccattggaaacgatgattaaaacctcataatgctgaaccaacacatgttggatcagccaaagattta

SEQ ID NO: 337 - DNA, 225 bp, Unknown
  Encodes 16S rRNA from Lachnospiracea incertae sedis
agagtttgatcctggctcaggatgaacgctggcggcgtgcttaacacatgcaagtcgaacgaagcatagtgaatgaagttttcggatggatttcactttgacttagtggcggacgggtgagtaacgcgtgggcaacctgcccttaaccgggggacaacagttggaaacgactgctaataccgcataagcgcacgtgaccgcatggtcgagtgtgaaaaattccgg

SEQ ID NO: 338 - DNA, 225 bp, Unknown
  Encodes 16S rRNA from Prevotella
agagtttgatcatggctcaggatgaacgctagctacaggcttaacacatgcaagtcgaggggcagcatgtcgtgtgcttgcacacgatgatggcgaccggcgcacgggtgagtaacgcgtatccaacctgcccatgaccccgggatagcccgctgaaaagcggattaacaccggatgcggtcgaaagaggacatctgatttcgaccaaagcttttgcggtcatgg

SEQ ID NO: 339 - DNA, 225 bp, Unknown
  Encodes 16S rRNA from Clostridium sensu stricto
agagtttgatcatggctcaggacgaacgctggcggcatgcctaacccatgcaagtcgaacggacgagacgacttcggttgtcaagtcagtggcggacgggtgagtaacacgtgaacaaccaacctcatactgggggacaacatttggaaacgaatgctaataccgcataagaccacagagccgcatggctcagaggtcaaaggagaaatccggtatgagacgggt

SEQ ID NO: 340 - DNA, 225 bp, Unknown
  Encodes 16S rRNA from Victivallis
agagtttgatcctggctcagaacgaacgctggcggcatggattaggcatgcaagtcgaacgaagcagcaatgcttagtggcgcaagggtgaggaacacgtgagtgacctacccgcaagtttggaacagctcctggaaacgggaattaataccggatgtgatcatgaagctgcatggtttcatgattaaagcagcaatgcgcttgcggatgggctcgcgtcccatt

SEQ ID NO: 341 - DNA, 225 bp, Unknown
  Encodes 16S rRNA from unknown taxa
agagtttgatcctggctcaggacgaacgctggcggtgtgcctcatacatgcaagtcgaacgataaggtctcttcggagatacataagtggcggacgggtgagtacaacataggaaatctgccttaaggcgggggacaacagagggaaacttctgctaataccccatatgagctaagctgaaatgcttatcttgaaagctccggcgccttgagatgagcctgtgcc

SEQ ID NO: 342 - DNA, 225 bp, Unknown
  Encodes 16S rRNA from Treponema
agagtttgatcctggctcagaacgaacgctggcggcgcgtcttaagcatgcaagtcgagcgggaataagggagcttgcttccttatgagagcggcggactggtgagtaacacgtgggtaacgcatcctcctgacggggacagcctgtggaaacacagggtaataccggatgagatggacttctggaagggagttcatgaaaggagctacggctccgcagggggaa

SEQ ID NO: 343 - DNA, 225 bp, Unknown
  Encodes 16S rRNA from Stenotrophomonas
agagtttgatcctggctcagagtgaacgctggcggtaggcctaacacatgcaagtcgaacggcagcacaggggagcttgctccccgggtggcgagtggcggacgggtgaggaatgcatcggaatctactctttcgtgggggataacgtagggaaacttacgctaataccgcatacgacctacgggtgaaagcaggggaccttttaggccttgcgcgattgaatga

SEQ ID NO: 344 - DNA, 225 bp, Unknown
  Encodes 16S rRNA from unknown taxa
agagtttgatcatggctcaggatgaacgctagcagaacgcctaacacatgcaagtcgaacgccccgatttatcggggagtggcagacgagcgagtaacacgtacttaacttgcccttgagatgggaacaactgcagagatgtagctaattcccaatatgctcacgatggtgaaatcccaatgtgaggaaagatttatcgctcaaggagaggggtgcgtcctatca

SEQ ID NO: 345 - DNA, 225 bp, Unknown
  Encodes 16S rRNA from Clostridium XlVa
agagtttgatcctggctcaggatgaacgctggcggcgtgcctaacacatgcaagtcgaacgggaacctcacagtggagacttcggtcaaagcagtgagaattctagtggcggatgggtgagtaacgcgtgggtaacctgcctataagaattggataacagtgagaaatcactgctaatacaatataagcttacagtatcgcatgataaagtgagaaaagatttat

SEQ ID NO: 346 - DNA, 225 bp, Unknown
  Encodes 16S rRNA from Sphingobium
agagtttgatcctggctcagagtgaacgctagcggaatgctttatacatgcaagtcgaacggaaaattagaaggagtagcaatacaaatttgaagtttttagtggcgaactggcgagtaatagttaggaacttaccgagtagtgggggacaacagttagaaatgactgctaataccgcatacgcccgagaggggaaagatttatcgctatttgagaggcctaacc

SEQ ID NO: 347 - DNA, 184 bp, Unknown
  Encodes 16S rRNA from Lachnospiracea incertae sedis
agagtttgatcatggctcaggataaacgctggcggcgtgctttggacaatgggggcaaccctgatccagcgacgccgcgtgagcgaagaagtatctcggtatgtaaagctctatcagcagggaagataatgacggtacctgactaagaagcaccggctaaatacgtgccagcagccgcggtaat

SEQ ID NO: 348 - DNA, 225 bp, Unknown
  Encodes 16S rRNA from Oscillibacter
agagtttgatcatggctcaggatgaacgctggcggcgtgcttaacacatgcaagtcgaacggacgaggcggagcttgctctgccgagttagtggcggacgggtgagtaacgcgtgagcaacctgcctttcagagggggacaacgttgggaaaccggcgctaataccgcataatatgcttttgccgcatgacagaagtatcaaaggagcaatccgctgaaagatgg

SEQ ID NO: 349 - DNA, 225 bp, Unknown
  Encodes 16S rRNA from Methylobacterium
agagtttgatcatggctcagagcgaacgctggcggcaggcttaacacatgcaagtcgagcggacctttcggggtcagcggcggacgggtgagtaacgcgtgggaacgtgccttccggttcggaataaccctgggaaactagggctaataccggatacgcccttatggggaaaggtttactgccggaagatcggcccgcgtctgattagctagttggtggggtaac

SEQ ID NO: 350 - DNA, 225 bp, Unknown
  Encodes 16S rRNA from Zhangella
agagtttgatcctggctcagaacgaacgctggcggcatgcttaacacatgcaagtcgaacggtgttgcatagcacttgtgttatgtaacatagtggcaaacgggtgagtaacgcgtggaaacatacccctcagtattggataacgtttggaaacgaacgctaatacaatatacgctcgagagaggaaagagagatcgctgagggagtggtccgcgtcagattaga

SEQ ID NO: 351 - DNA, 225 bp, Unknown
  Encodes 16S rRNA from Lachnospiracea incertae sedis
agagtttgatcctggctcaggatgaacgctggcggcgtgcttaacacatgcaagtcgaacggagttgtttcaccgaatgaactggagagcttgctcaaaggggaattcaccgagacaacttagtggcggacgggtgagtaacgcgtgggtaacctacccttatcagggggataacagtcggaaacgactgctaataccgcataagcgcacagtatcgcatgatac

SEQ ID NO: 352 - DNA, 225 bp, Unknown
  Encodes 16S rRNA from Oscillibacter
agagtttgatcatggctcaggacgaacgctggcggcgtgcctaacacatgcaagtcgaacgaagctcttttcaatgcgattcgtcaagttgaaaggatgacttagtggcgaacgggtgagtaacgcgtgagcaacctgccccggagtgggggacaacagttggaaacgactgctaataccgcatgacatgttcggatggcatcatctgaacatcaaagatttatt

SEQ ID NO: 353 - DNA, 225 bp, Unknown
  Encodes 16S rRNA from Clostridium III
agagtttgatcatggctcaggacgaacgctggcggcgtgcctaacacatgcaagtcgaacgaacttactagcaatagtaagttagtggcggacgggtgagtaatacatgagtaacctgccttatacagggggataacacctagaaatgggtgctaataccgcataataactcagtatggcatcatattgagaggaaaggagcaatccggtaaaagatggactcat

SEQ ID NO: 354 - DNA, 225 bp, Unknown
  Encodes 16S rRNA from Coraliomargarita
agagtttgatcctggctcagagtgaacgctggcggcgtggctaagacatgcaagtcgagcgagaaggtgccttcgggtgccggaaagcggcaaacgggtgcgtaacacgtaagtaacctgcccttaagacgggaacagcttgatgaaaattgagataatgcccgatatccgcttctttcgcatgggagaagtcggaaaggtttgtgatgacgcttaaggaggggc

SEQ ID NO: 355 - DNA, 225 bp, Unknown
  Encodes 16S rRNA from Eubacterium
agagtttgatcatggctcaggattaacgctggcggcgtgcctaacacatgcaagtcgagcgagaagtggtgaaatgaaacttcggtagattggatccatggacagcggcggacgggtgagtaacgcgtgggcaacctgcccctttccggaggatagccaagggaaactttgaataatactccataaagcaagagtaccgcatgatacacttgccaaagatttatc

SEQ ID NO: 356 - DNA, 225 bp, Unknown
  Encodes 16S rRNA from Enterorhabdus
agagtttgatcatggctcaggatgaacgctggcggcgtgcctaacacatgcaagtcgaacggttaaaccgccctcgggcggacatagagtggcgaacgggtgagtaacacgtgaccaacctgccccgcgcaccgggacagccccccgaaagggggattaataccggatactccggggcccccgcatgggggccccgggaaagcccaggcggcgcgggatggggtc

SEQ ID NO: 357 - DNA, 225 bp, Unknown
  Encodes 16S rRNA from Clostridium XlVa
agagtttgatcatggctcaggatgaacgctggcggcgtgcttaacacatgcaagtcgaacgaatttcttattcgcggaggcttcggccgaaggggatatgaagtgagtggcggacgggtgagtaacgcgtgggtaacctgccttacaccgggggataacagagggaaacttctgctaataccgcataagaccacagtgccgcatggtacagaggtaaaagttccg

SEQ ID NO: 358 - DNA, 225 bp, Unknown
  Encodes 16S rRNA from Saccharofermentans
agagtttgatcctggctcaggatgaacgctggcggcgtgcttaacacatgcaagtcgaacgggaagacttttaggaagatttcggttggaataaaagtattctagtggcggacgggtgagtaacgcgtaaacaatctgccttagagagggggataacagatagaaatatttgctaataccgcataagaccacgtttaggcatctagatggggtaaaaggagcaat

SEQ ID NO: 359 - DNA, 225 bp, Unknown
  Encodes 16S rRNA from Clostridium IV
agagtttgatcatggctcaggatgaacgctggcggcgtgcttaacacattcaagtcgaacggacaagagggggcttgctcccttgcgttagtggcggacgggtgagtaacgcgtgagcaacctgcctttctccgggggataacattgggaaaccggtgctaataccgcataacgtacagagatcacatggtcattgtaccaaagatttatcggggaaagatgggc

SEQ ID NO: 360 - DNA, 225 bp, Unknown
  Encodes 16S rRNA from Clostridium sensu stricto
agagtttgatcatggctcaggacgaacgctggcggcgtgcctaacacatgcaagtcgagcggggactgcacgacggatttgaagatttcggttggatatgaagatgtacagttctagcggcggacgggtgagtaacgcgtgagcaacctgtcccttacagggggataacacagcgaaagttgtactaataccgcatgagaccacgatatcacatggtataggggt

SEQ ID NO: 361 - DNA, 225 bp, Unknown
  Encodes 16S rRNA from Victivallis
agagtttgatcctggctcagaacgaacgctggcggcatggattaggcatgcaagtcgaacgaagcagcaatgcttagtggcggaagggtgaggaacgcgtgagtaatctgcccccaagttgggaataacagttggaaacgactgctaataccgaatgtggctgcgaagtcgcatgattttgcagttaaagatttattgcttggggatgagctcgcgtcccattag

SEQ ID NO: 362 - DNA, 225 bp, Unknown
  Encodes 16S rRNA from Coprococcus
agagtttgatcatggctcaggatgaacgctggcggcgtgcttaacacatgcaagtcgaacggagtacttacgctgatgaagcttcggcagagtcttgtaagtacttagtggcggacgggtgagtaacgcgtgggtaacctgccttataccgggggataacgtctggaaacggacgctaataccgcataagcgcacgatgaggcatcttgttgtgtgaaaaactcc

SEQ ID NO: 363 - DNA, 225 bp, Unknown
  Encodes 16S rRNA from Pseudoflavonifractor
agagtttgatcatggctcaggacgaacgctggcggcgtgcttaacacatgcaagtcgaacgaggataatgacttcggttgttattcgagtggcggacgggtgagtaacgcgtgagcaatctgtccttaagagggggataacaactggaaacagttgctaataccgcataagaccacggcctcacatggggctgaggtaaaagaagcaattcgcttaagggtgagc

SEQ ID NO: 364 - DNA, 225 bp, Unknown
  Encodes 16S rRNA from Anaeroplasma
agagtttgatcatggctcaggattaacgctggcggcgtgcctaatacatgcaagtcgaatggttagcttgctaaccatggcgaacgggtgagtaacacgtaggcaacctgtctaagagacgaggataaccattggaaacgatggataatactggataggatataataaggcatcttgttatatttaaagatttatcacttttagaggggcctgcggcgcattagc

SEQ ID NO: 365 - DNA, 225 bp, Unknown
  Encodes 16S rRNA from Anaeroplasma
agagtttgatcatggctcaggattaacgctggcggcgtgcctaatacatgcaagtcgaatggtggtagcaatacaaaccatggcgaacgggtgagtaacacgtaggtaacctatcttactgacgaggataaccgttggaaacgacggataatactggataggacatcataaagggcatccttagatgtttaaaggagcaatccacggtaagaggggcctgcggcg

SEQ ID NO: 366 - DNA, 225 bp, Unknown
  Encodes 16S rRNA from Bacteroides
agagtttgatcctggctcaggatgaacgctagctacaggcttaacacatgcaagtcgaggggcagcattaagtcagcttgctgatttagatggcgaccggcgcacgggtgagtaacgcgtatccaacctgccccctacccggggatagccttgcgaaagtaagattaatacccggtgctgttatgattccgcatgggaatataacgaaagattcatcggtagggg

SEQ ID NO: 367 - DNA, 225 bp, Unknown
  Encodes 16S rRNA from Acinetobacter
agagtttgatcatggctcagattgaacgctggcggcaggcttaacacatgcaagtcgagcggggatagggtgcttgcacctgattcctagcggcggacgggtgagtaatgcttaggaatctgcctattagtgggggacaacgttccgaaagggacgctaataccgcatacgtcctacgggagaaagcaggggatcttcggaccttgcgctaatagatgagcctaa

SEQ ID NO: 368 - DNA, 225 bp, Unknown
  Encodes 16S rRNA from Victivallis
agagtttgatcctggctcagaacgaacgctggcggcatggattaggcatgcaagtcgaacgaagcagcaatgcttagtggcggaagggtgaggaacgcgtgagtaatctgccctcaagttgggaataacagctggaaacggctgctaataccgaatgtggctgttgggtcgcatgatctgacagttaaagatttattgcttgaggatgagctcgcgtcccattag

SEQ ID NO: 369 - DNA, 225 bp, Unknown
  Encodes 16S rRNA from Victivallis
agagtttgatcctggctcagaacgaacgctggcggcatggattaggcatgcaagtcgaacgggtgcagcaatgcaccagtggcgcaagggtgaggaacacgtgagtaatctaccctcaagattgggatagctcctggaaacgggaattaataccggatgaaacagtatgtccgcatggatgtacttttaaagcagcaatgcgcttgaggaggagctcgcgtccca

SEQ ID NO: 370 - DNA, 225 bp, Unknown
  Encodes 16S rRNA from Mogibacterium
agagtttgatcatggctcaggatgaacgctggcggcgtgcctaatacatgcaagtcgagcgagattctgtcagatgagacttcggtggattcagacggatgaaagcggcggacgggtgagtaacgcgtaggcaacctgccccatgcacagggatagccactggaaacggtgattaatacctgataatgcggaccgtatgcatatacggactgccaaagatttatc

SEQ ID NO: 371 - DNA, 225 bp, Unknown
  Encodes 16S rRNA from Oscillibacter
agagtttgatcatggctcaggacgaacgctggcggcgtgcttaacacatgcaagtcgaacggagtgcccttgaaagaggtttcggccaatggaaggggttacttagtggcggactggtgagtaacgcgtgaggaacctgcctttcagagggggacaacagctggaaacggctgctaataccgcatgacacattcgggcggcatcgcctggatgtcaaagatttat

SEQ ID NO: 372 - DNA, 225 bp, Unknown
  Encodes 16S rRNA from Butyricimonas
agagtttgatcctggctcaggatgaacgctagcgacaggcttaacacatgcaagtcgaggggcagcacggcggtggcaacactgctggtggcgaccggcgcactggtgagtaacacgtatgcaacctgccccgcacagggggataatccgcggaaacgcggtctaataccccgtagaacctttggtcgcatgattagaggtggaaagctccggtggtgcgggatg

SEQ ID NO: 373 - DNA, 225 bp, Unknown
  Encodes 16S rRNA from Dethiosulfovibrio
agagtttgatcatggctcaggatgaacgctggcggcgtgcataacacattcaagtcgaacgaagcgccgggacggaacccttcggggggaagacccgatgacttagtggcggacgggtgagtaacgcgtgagcaacctgcctgcgatagagggataacaccgggaaaccggtgctaataccacatgaggcagagaggtcacatggtctttctgttaaagatttat

SEQ ID NO: 374 - DNA, 225 bp, Unknown
  Encodes 16S rRNA from Pseudoflavonifractor
agagtttgatcatggctcaggatgaacgctggcggcgcgcctaacacatgcaagtcgaacggcgaagtcccttcgggggcggaacagtggcggacgggtgagtaacgcgtgagtaacctgcccttacgagcggaatagcgtcgggaaactgacggtaataccgcatgaagcttgaccccggcatcggggagaagccaaagatttatcgcgtaaggatggactcgc

SEQ ID NO: 375 - DNA, 225 bp, Unknown
  Encodes 16S rRNA from Clostridium IV
agagtttgatcatggctcaggatgaacgctggcggcgtgcctaacacatgcaagtcgaacggagctttttatgaacaagacttcggtcaagtaaattctaagcttagtggcggacgggtgagtaacgcgtgagtaacctgcctttcagagggggataacgttcggaaacgaacgctaataccgcataacatagcggaaccgcatgattctgctatcaaagatttt

SEQ ID NO: 376 - DNA, 225 bp, Unknown
  Encodes 16S rRNA from Anaeroplasma
agagtttgatcatggctcaggattaacgctggcggcgtgcctaatacatgcaagtcgaatggttagcttgctaaccatggcgaacgggtgagtaacacgtaggcaacctgtcttacagacgaggataaccgttggaaacgacggataatactggatagtacatcacaatgggcatccatagatgtttaaaggagcaatccactgtaagaggggcctgcggcgcat

SEQ ID NO: 377 - DNA, 225 bp, Unknown
  Encodes 16S rRNA from Oscillibacter
agagtttgatcatggctcaggatgaacgctggcggcgtgcctaacacatgcaagtcgaacggagcttattggaaggagacttcggtcaacggaagataagcttagtggcggacgggtgagtaacgcgtgagcaacctgcctcagagtgggggacaacagctggaaacggctgctaataccgcataacattgcctgaaggcatcttcgggtaatcaaagcttaatg

SEQ ID NO: 378 - DNA, 225 bp, Unknown
  Encodes 16S rRNA from Herbiconiux
agagtttgatcatggctcaggacgaacgctggcggcatgcctaacacatgcaagtcgaacggacggaagtagcaatactgaagttagtggcgaacgggtgagtaacacgtgagcaacctgccctatacactgggatagcagttggaaacgactgataataccggataagaccacgctgtcgcatgacagaggggtcaaagcgctttagcggtatgggatgggctc

SEQ ID NO: 379 - DNA, 225 bp, Unknown
  Encodes 16S rRNA from Eubacterium
agagtttgatcatggctcaggattaacgctggcggcgtgcctaacacatgcaagtcgagcgagaagcagtgaagggagtcttcggacaaacggaactgtggacagcggcggacgggtgagtaacgcgtgggcaacctgcccctttccggaggatagccaagggaaactttgaataatactccataaagcagagatgtcgcatggcaattctgccaaagatttatc

SEQ ID NO: 380 - DNA, 225 bp, Unknown
  Encodes 16S rRNA from unknown taxa
agagtttgatcatggctcaggacgaacgcttgcgacgtgcctaagaaatgcaagtcgagcgatgacgggggcttcggctccttgattagcggcgaacggtcgcgtaacacgtaagcaatctgccccaaagtttgggatagccatccgaaaggatgattaataccggatgtggaatatatatcgcatgttatatattctaaagcagcgatgcgctttgggatgagc

SEQ ID NO: 381 - DNA, 225 bp, Unknown
  Encodes 16S rRNA from Selenomonas
agagtttgatcctggctcaggacgaacgctggcggcgtgcttaacacatgcaagtcgaacgagacgattttaagcttgcttagatgagtcgagtggcaaacgggtgagtaacgcgtagacaacctgccgcaaagatggggacaacagtccgaaaggactgctaataccgaatgttgtcaagtttccgcatgggagcttgattaaagatggcctctacttgtaagc

SEQ ID NO: 382 - DNA, 225 bp, Unknown
  Encodes 16S rRNA from Clostridium IV
agagtttgatcatggctcaggacgaacgctggcggcgtgcttaacacatgcaagtcgaacgaagcttgatttaagatttcttcggaatgattaatgatatgacttagtggcggacgggtgagtaacgcgtgaggaacctgcctttcagagggggacaacatttggaaacgaatgctaataccgcataacgcatttaagggacatcccatagatgccaaagattta

SEQ ID NO: 383 - DNA, 225 bp, Unknown
  Encodes 16S rRNA from Mogibacterium
agagtttgatcatggctcaggatgaacgctggcggcgtgcctaatacatgcaagtcgagcgagaatctcttcagaagcgttttcggacaattccgaggagaggaaagcggcggacgggtgagtaacgcgtaggcaacctgcccttagcagagggatagccattggaaacgatgattaaaacctcataatgctgttgtgacacatgtcagagcagccaaagattta

SEQ ID NO: 384 - DNA, 225 bp, Unknown
  Encodes 16S rRNA from Clostridium IV
agagtttgatcatggctcaggatgaacgctggcggcgtgcctaacacattcaagtcgaacggagaagggggcttcggtcccctgatcagtggcggacgggtgagtaacgcgtgagcaacctgcctttgtgtggggaataacacagggaaacttgtgctaataccgcataacgcatcgacgtagcattacgatgatgccaaagatttattgcacgaagatgggctc

SEQ ID NO: 385 - DNA, 225 bp, Unknown
  Encodes 16S rRNA from Roseburia
agagtttgatcatggctcaggatgaacgctggcggcgtgcttaacacatgcaagtcgaacgaagcgatcctttgtgaagcgaagaagcttgcttcctagtggaactgtggattgacttagtggcggacgggtgagtaacgcgtgggtaacctgcctcacacagggggataacagttagaaatgactgctaataccgcataaaatggcagtgtcgcatgacacaac

SEQ ID NO: 386 - DNA, 225 bp, Unknown
  Encodes 16S rRNA from Anaerovibrio
agagtttgatcatggctcaggacgaacgctggcggcgtgcttaacacatgcaagtcgaacggggcgaagaggagcttgctcttcctagcctagtggcaaacgggtgagtaacgcgtaggcaacctgcccttcagatggggacaacatttcgaaaggaatgctaataccgaatgacgtgcattggtcgcatgaccgatgtaccaaaggccgggcaaccggtcactg

SEQ ID NO: 387 - DNA, 225 bp, Unknown
  Encodes 16S rRNA from Clostridium III
agagtttgatcctggctcaggacgaacgctggcggtatgcttaatacatgcaagtcgaacggagctcagcggaagcttgcttctgcgaaagcttagtggcggacgggtgagtaacgcgtgagtaacctgccttaaagagggggataacacagagaaatctgtgctaataccgcataatgcagcgaagccgcatggctatgctgccaaaggtcagccgctttaaga

SEQ ID NO: 388 - DNA, 225 bp, Unknown
  Encodes 16S rRNA from Saccharofermentans
agagtttgatcatggctcaggacgaacgctggcggcgtgcctaacacatgcaagtcgagcggagatgaggagaagcttgcttcgagacatcttagcggcggacgggtgagtaacgcgtgagcaacctgtcctctgcagggggataagacagcgaaagttgttctaataccgcatgagaccacaacgtcacatggcgaaggggtcaaaggagaaatccggcagagg

SEQ ID NO: 389 - DNA, 225 bp, Unknown
  Encodes 16S rRNA from Saccharofermentans
agagtttgatcatggctcaggatgaacgctggcggcgtgcctaacacatgcaagtcgaacggacgatgaagctcagcttgctgagattcaaagttagtggcggactggtgagtaatgtatgagcaacctgcctttcagaggggaataacacaatgaaagttgtgctaataccgcataatattgtaatattgcatgataatacaatcaaaggagtgatccgctgag

SEQ ID NO: 390 - DNA, 225 bp, Unknown
  Encodes 16S rRNA from Prevotella
agagtttgatcatggctcaggatgaacgctagctacaggcttaacacatgcaagtcgaggggcagcatgggagttgcttgcaattcccgatggcgaccggcgcacgggtgagtaacgcgtatccaaccttcccttaactccggaatagcccgctgaaaggcggattaatgccggatgcggtccagcgagggcatctgacccggaccaaaggattcgtccggttaa

SEQ ID NO: 391 - DNA, 225 bp, Unknown
  Encodes 16S rRNA from Clostridium XlVa
agagtttgatcatggctcaggatgaacgctggcggcgtgcctaacacatgcaagtcgaacggaaatgttctgatgaagtcttcggatagattcattacattttagtggcggacgggtgagtaacacgtgggtaacctgccctgtaccgggggataacacttagaaataggtgataataccgcataagcgcacactgaggcatctcagagtgtgaaaaactccggt

SEQ ID NO: 392 - DNA, 225 bp, Unknown
  Encodes 16S rRNA from Robinsoniella
agagtttgatcctggctcaggatgaacgctagctacaggcttaacacatgcaagtcgagcgatgaataaaccgacaaggtttcggccaaggaagtttattcagagcggcggatgggtgaggaacgcgtggggaacctgcctttcaccgggggataccagctggaaacggctgttaataccgcatatgctcacagtgccgcatggcacagggaggaaaactccggt

SEQ ID NO: 393 - DNA, 225 bp, Unknown
  Encodes 16S rRNA from Brevundimonas
agagtttgatcatggctcaggacgaacgctggcggtgtgcctcatacatgcaagtcgaacgataaggcttcttcggaagtacataagtggcggacgggtgagtacaacataggaaatctgccttagggtgggggacaacagagggaaactcctgctaataccccatatgagctaacttgaaatagttatcttgaaaactccggtgccctaagatgagcctgtgcc

SEQ ID NO: 394 - DNA, 225 bp, Unknown
  Encodes 16S rRNA from Anaerotruncus
agagtttgatcatggctcaggacgaacgctggcggcgcgcttaacacatgcaagtcgaacggagtgtgcttttgaaggtccttcgggaacggatgttgtacacttagtggcggacgggtgagtaacgcgtgagcaacctgcctttcagagggggataacacaacgaaagctgtgctaataccgcatgacattgcgacaccgcatggtgatgcaatcaaaggagca

SEQ ID NO: 395 - DNA, 225 bp, Unknown
  Encodes 16S rRNA from Victivallis
agagtttgatcatggctcagaacgaacgctggcggcatggattaggcatgcaagtcgaacgaagcagcaatgcttagtggcgcaagggtgaggaacacgtgagtgacctacccgcaagtttggaacagctcctggaaacgggaattaataccggatgtgatcgatgaactgcatggtttattgattaaagcagcaatgcgcttgcggatgggctcgcgtcccatt

SEQ ID NO: 396 - DNA, 225 bp, Unknown
  Encodes 16S rRNA from Bacteroides
agagtttgatcctggctcaggatgaacgctagcgacaggcctaacacatgcaagtcgaggggcagcatggttgaagcttgcttcaactgatggcgaccggcgcacgggtgcgtaacgggtgtgcaatttgtcctataccaagggatagcccgctgaaaggcggattaatactttatgtgagtagggggggcatcctctttatttgaaacgtgagggtataggttg

SEQ ID NO: 397 - DNA, 225 bp, Unknown
  Encodes 16S rRNA from Clostridium XlVb
agagtttgatcatggctcaggacgaacgctggcggcgtgcttaatacatgcaagtcgaacgaggtatagcaatataccgagtggcgaacgggtgagtaacacgtgagcaacctgccctatacagggggacaacagctggaaacggctgctaataccgcataagaccacagcaccgcatggtgcaggggtaaaaggctacggtcggtataggatgggctcgcgtac

SEQ ID NO: 398 - DNA, 225 bp, Unknown
  Encodes 16S rRNA from Prevotella
agagtttgatcctggctcaggatgaacgctagctacaggcttaacacatgcaagtcgaggggcatcatgaagtttgcttgcaagctttgatggcgaccggcgcacgggtgcgtaacgcgtatccaatctaccagttactcgggtatagccttgcgaaagtaagattaatccccgatgagtatagttactgcatggtgattatataaaagatttatcggtagctga

SEQ ID NO: 399 - DNA, 225 bp, Unknown
  Encodes 16S rRNA from Ruminococcus
agagtttgatcatggctcaggacgaacgctggcggcacgcttaacacatgcaagtcgaacgagcgaagagagcttgctctccaagctagtggcggacgggtgagtaacacgtgagcaatctgcctttgggtgggggataccagttggaaacgactgttaataccgcataaaatagtaagaccgcatgatcatactatcaaagattcattgcctgaagatgagctc

SEQ ID NO: 400 - DNA, 225 bp, Unknown
  Encodes 16S rRNA from Pelobacter
agagtttgatcctggctcagaattaacgctggcggcgtgcctaacacatgcaagtcgagcgaattcttacagagcatcgtaagagttagcggcaaacgggtgagtaacacatgggaaacctccctcgaaatggggaatatcttcgtgaaaacggagttaataccgcataagaccacagtttggcatcagacaggggtcaaagcagcaatgcgtttcgagatggtc

SEQ ID NO: 401 - DNA, 225 bp, Unknown
  Encodes 16S rRNA from Clostridium XlVa
agagtttgatcatggctcaggatgaacgctggcggcgtgcttaacacatgcaagtcgaacgaatttcttacggatcgcgacttcggtcaagagaagtttgaagtgagtggcggacgggtgagtaacgcgtgggtaacctgccttacaccgggggataacagagggaaacttctgctaataccgcataagaccacagtgccgcatggtacagaggtaaaagttccg

SEQ ID NO: 402 - DNA, 225 bp, Unknown
  Encodes 16S rRNA from Clostridium XlVa
agagtttgatcatggctcaggatgaacgctggcggcgtgcctaacacatgcaagtcgagcggagataagttgaagcctagcgattcttatcttagcggcggatgggtgagtaacacgtgggtaacctgccctgcactggggaataacagctggaaacggctgttaatgccgcatatgcgcacggagccgcatggctttgggcggaaagatttatcggtgcaggat

SEQ ID NO: 403 - DNA, 225 bp, Unknown
  Encodes 16S rRNA from Clostridium XlVb
agagtttgatcatggctcaggatgaacgctggcggcgtgcctaacacatgcaagtcgagcgaagcataggtgcttgcacttatgacttagcggcggacgggtgagtaacgcgtgggtaacctgccctatacagaggaataacagttagaaatgactgctaatgcctcataagccgacgaaatggcatctttttgtcggaaaagatttatcggtataggagggacc

SEQ ID NO: 404 - DNA, 225 bp, Unknown
  Encodes 16S rRNA from Coprococcus
agagtttgatcatggctcaggatgaacgctggcggcgtgcctaacacatgcaagtcgaacgaagtgtcaattcttcggagctgacacttagtggcggacgggtgagtaacgcgtgggtaacctgcctcatacagggggatagcagttggaaacgactgataataccgcataagcgcacagcatcgcatgatgcagtgtgaaaaactccggtggtatgagatggac

SEQ ID NO: 405 - DNA, 225 bp, Unknown
  Encodes 16S rRNA from Clostridium IV
agagtttgatcatggctcaggacgaacgctggcggcgtgcctaacacatgcaagtcgaacggagttattcgaaagcttgcttttggataacttagtggcggacgggtgagtaacgcgtgagtaacctgcctttcagagggggataacgttctgaaaagaacgctaataccgcataatgtataattgtcgcatggcagcgataccaaaggagcaatccgctgaaag

SEQ ID NO: 406 - DNA, 225 bp, Unknown
  Encodes 16S rRNA from Clostridium IV
agagtttgatcctggctcaggatgaacgctggcggcgtgcctaacacatgcaagtcgaacggaacttttaaggaacaagacttcggtcaagtgatatttaagtttagtggcggacgggtgagtaacgcgtgagcaacctgcctctcagagggggataacgtccggaaacggacgctaataccgcataacatggagagatcgcatgatcattccatcaaagatttt

SEQ ID NO: 407 - DNA, 225 bp, Unknown
  Encodes 16S rRNA from Coprococcus
agagtttgatcatggctcaggatgaacgctggcggcgtgcttaacacatgcaagtcgaacgaagcacttacgattgactggagagcttgctcaaagggattttgtttgtgacttagtggcggacgggtgagtaacgcgtgggtaacctgcctcatacagggggataacagttggaaacgactgttaataccgcataagcgcacagtaccgcatggtacagtgtga

SEQ ID NO: 408 - DNA, 225 bp, Unknown
  Encodes 16S rRNA from Victivallis
agagtttgatcctggctcagaacgaacgctggcggcatggattaggcatgcaagtcgaacgaagcagcaatgcttagtggcggaagggtgaggaacgcgtgagcaacctgcccccaagttgggaataacagttggaaacgactgctaataccgaatgtggcttttggaccgcatggtttgatggctaaagatttattgcttggggatgggctcgcgtcccattag

SEQ ID NO: 409 - DNA, 225 bp, Unknown
  Encodes 16S rRNA from Clostridium III
agagtttgatcatggctcaggacgaacgctggcggcgtgcctaacacatgcaagtcgagcggagcttaagaagtcagaagttttcggacggaagacattttaagcttagcggcggacgggtgagtaacgcgtgggcaatctgcccttcacagggggataacacagggaaacttgtgctaataccgcataagatcgtataacggcatcgttaagcgaccaaaggag

SEQ ID NO: 410 - DNA, 225 bp, Unknown
  Encodes 16S rRNA from Anaerovibrio
agagtttgatcctggctcaggacgaacgctggcggcgtgcttaacacatgcaagtcgaacggggcgaagaggagcttgctcttcctagcctagtggcaaacgggtgagtaacgcgtaggcaacctgcccttcagatggggacaacatttcgaaaggaatgctaataccgaatgacgtgcattggtcgcatgaccgatgtaccaaaggccgggcaaccggtcactg

SEQ ID NO: 411 - DNA, 225 bp, Unknown
  Encodes 16S rRNA from Anaerovorax
agagtttgatcctggctcaggatgaacgctggcggcgtgcctaacacatgcaagtcgagcgagaaatcatcagaatgaaacttcggtagatttcagatgatggaaagcggcggacgggtgagtaacgcgtaggcaacctgccctttgcagagggatagccatgggaaactgtgattaaaacctcataacaccattctatcacatgttagaacggtcaaagattta

SEQ ID NO: 412 - DNA, 225 bp, Unknown
  Encodes 16S rRNA from Proteiniclasticum
agagtttgatcatggctcaggacgaacgctggcggcgtgcttaacacatgcaagtcgaacgagggatgaataaagcttgctttgttcatttcgagtggcggacgggtgagtaacgcgtgaggaacctggcttttgcagggggatagcgtcccgaaagagacggtaataccgcataagaccacgctaccgcatggtaaaggggtcaaaggagagatccggcagaag

SEQ ID NO: 413 - DNA, 225 bp, Unknown
  Encodes 16S rRNA from Anaerovorax
agagtttgatcatggctcaggatgaacgctggcggcgtgcctaacacatgcaagtcgagcgagaaacttttgactgacgcttcggttgatttcaaaagcggaaagcggcggacgggtgagtaacgcgtaggcaacctgccctttgcagagggatagcctcgggaaaccgggattaaaacctcataacaccggagtacctcatggtgcaccggtcaaagatttatc

SEQ ID NO: 414 - DNA, 225 bp, Unknown
  Encodes 16S rRNA from Selenomonas
agagtttgatcctggctcaggacgaacgctggcggcgtgcttaacacatgcaagtcgaacgaggtgattgaaagcttgcttttgagaaccgagtggcaaacgggtgagtaacgcgtagacaacctgccgcaaagatggggacaacagtccgaaaggactgctaataccgaatgttgtgcaacttccgcatgggagatgcattaaagatggcctctacttgtaagc

SEQ ID NO: 415 - DNA, 225 bp, Unknown
  Encodes 16S rRNA from Hydrogenoanaerobacterium
agagtttgatcatggctcaggacgaacgctggcggcacgcttaacacatgcaagtcgaacggaacttgggagcttgctttcaagtttagtggcggacgggtgagtaacacgtgagcaacctgcctttcggcggggaataatgattggaaacgatcactaataccccataaaataggtttatcgcatgatagatttatcaaagattcatcaccgaaagatgggctc

SEQ ID NO: 416 - DNA, 225 bp, Unknown
  Encodes 16S rRNA from Acetanaerobacterium
agagtttgatcatggctcaggacgaacgctggcggcgcgcctaacacatgcaagtcgaacggacgaggatccttcgggatccgagttagtggcgaacgggtgagtaacacgtgaggaacctacctttcagagggggataacacttagaaataggtgctaataccgcataagaccacgaccgggcatccggatgaggtcaaaggagcaatccgctgagagacggcc

SEQ ID NO: 417 - DNA, 225 bp, Unknown
  Encodes 16S rRNA from Clostridium XlVa
agagtttgatcctggctcaggatgaacgctggcggcgtgcttaacacatgcaagtcgaacgaagcatgagctgaaattttcggatggatgcccatgacttagtggcggacgggtgagtaacgcgtgggtaacctgcctcatgcagggggacaacagctggaaacggctgctaataccgcataagaccccgtgagcgcatgctcaagaggtaaaagatttatcggc

SEQ ID NO: 418 - DNA, 225 bp, Unknown
  Encodes 16S rRNA from Asaccharobacter
agagtttgatcatggctcaggatgaacgctggcggcgtgcttaacacatgcaagtcgaacgattaaaccggcttcggccggatatagagtggcgaacgggtgagtaacacgtgaccaacctgccccatacttcgggataactcagggaaacttgtgctaataccggatactccgatttgatcgcatggtcttttcgggaaagcctttacggtatgggatggggtc

SEQ ID NO: 419 - DNA, 225 bp, Unknown
  Encodes 16S rRNA from Clostridium XlVa
agagtttgatcatggctcaggatgaacgctggcggcgtgcttaatacatgcaagtcgaacggagatgtccacctgatgaagcagagtgcttgcacaaagcagaatcaaccggatatcttagtggcggacgggtgagtaacgcgtgggtaacctgcctcatactggggaataacagccagaaatgactgctaataccgcataagcgcacagtaccgcatgatacag

SEQ ID NO: 420 - DNA, 225 bp, Unknown
  Encodes 16S rRNA from Lachnospiracea incertae sedis
agagtttgatcctggctcaggatgaacgctggcggcgtgcctaacacatgcaagtcgagcggagtaagacaccggatgaagattcgtctgaatccaccgtcttacttagcggcggatgggtgagtaacgcgtggacaacctgcccttcactgggggataacaaccggaaacgggtgctaataccgcatgggcgcgaacgaccgcatgatcgatcgcgtaaagatt

SEQ ID NO: 421 - DNA, 225 bp, Unknown
  Encodes 16S rRNA from Saccharofermentans
agagtttgatcatggctcaggatgaacgctggcggcgtgcctaacacattcaagtcgaacggagatatacggaagcttgcttttgtatattttagtggcggacgggtgagtaatgcatgagcaacctgccttgaagagggggataacacagagaaatttgtgctaataccgcgtaatctgccgaagcggcatcgcgttggcaggaaaggagcgatccgctttaag

SEQ ID NO: 422 - DNA, 225 bp, Unknown
  Encodes 16S rRNA from Prevotella
agagtttgatcatggctcaggatgaacgctagctacaggcttaacacatgcaagtcgaggggcagcatggcggtggcttgccaccgccgatggcgaccggcgcacgggtgagtaacgcgtatccaacctgcccgcaaccgcggaatagcccgccgaaaggcggattaatgccgcatgagctcgcgcgaggacatctgatcgcgagcaaaggtttttccggttgcg

SEQ ID NO: 423 - DNA, 225 bp, Unknown
  Encodes 16S rRNA from Anaeroplasma
agagtttgatcatggctcaggattaacgctggcggcgtgcctaatacatgcaagtcgaatggttagcttgctaaccatggcgaacgggtgagtaacacgtaggcaacctgtctataagacgaggataaccattggaaacgatggataatactggataggatattgaggggcatcccttaatatttaaagatttatcactaatagaggggcctgcggcgcattagc

SEQ ID NO: 424 - DNA, 225 bp, Unknown
  Encodes 16S rRNA from Spirochaeta
agagtttgatcctggctcagaacgaacgctggcggcgcgtcttaaccatgcaagtcggacggcaaggcgggagcttgctcctgccctagagtggcggactggtgagtaacacgtgggtgacgaaccctgctgactgggatagccgctagaaatagcggataataccggatacggccgtatgtatcagaagcatacggggaaagggagcttaggctccgcaggagg

SEQ ID NO: 425 - DNA, 225 bp, Unknown
  Encodes 16S rRNA from Alkaliphilus
agagtttgatcatggctcaggatgaacgctggcggcgtgcctaacacatgcaagtcgagcgggaaatctttgaatgaaacttcggtcgaatgatgagatggatagcggcggacgggtgagtaacgcgtaggtaagctgccccatgcacagggatagcctagggaaacttggattaatacctgatgacgctgcgaagtcacatgtctttgcagccaaagatctatc

SEQ ID NO: 426 - DNA, 225 bp, Unknown
  Encodes 16S rRNA from Paraprevotella
agagtttgatcatggctcaggatgaacgctagctacaggcttaacacatgcaagtcgaggggcagcatgtcgtgtgcttgcacacgatgatggcgaccggcgcacgggtgagtaacgcgtatccaacctgcccatgactccgggatagcccgctgaaaagcggattaacaccggatggggtcgaacgaggacatctgatttcgaccaaagctttttgcggtcatg

SEQ ID NO: 427 - DNA, 225 bp, Unknown
  Encodes 16S rRNA from Hippea
agagtttgatcatggctcagagttaacgctggcggcgtgcctaacacatgcaagtcgagcgaatttctacagagcatcgtagagattagcggcaaacgggtgagtaacacatgggaaaccttccttagaatggggaatatctccgtgaaaacggagctaataccgcataagaccacagattggcatcaaacaggggtaaaagcagcaatgcgttctaagatggtc

SEQ ID NO: 428 - DNA, 225 bp, Unknown
  Encodes 16S rRNA from Prevotella
agagtttgatcatggctcaggatgaacgctagctacaggcttaacacatgcaagtcgaggggcagcatgaacttagcttgctaagtttgatggcgaccggcgcacgggtgagtaacgcgtatccgaccttccctttgctcggggatagcccagtgaaaactggattaagacccgatgtagtccagctggcgcatgttatctggactaaagatttatcggcagagg

SEQ ID NO: 429 - DNA, 225 bp, Unknown
  Encodes 16S rRNA from Prevotella
agagtttgatcatggctcaggatgaacgctagctacaggcttaacacatgcaagtcgaggggcatcatgcaggttgcttgcaacctgtgatggcgaccggcgcacgggtgcgtaacgcgtatccaaccttccccgcagtagggttcagcccgttgaaagacggattaatcccctatgttgtccattgagggcctctgatttggacgaaagatttatcgctgcggg

SEQ ID NO: 430 - DNA, 225 bp, Unknown
  Encodes 16S rRNA from Hydrogenoanaerobacterium
agagtttgatcatggctcaggacgaacgctggcggcgcgcctaacacatgcaagtcgaacgggactagtgaccggagggtagaaggatctatcttgcgatcactagttcagtggcggacgggtgagtaaagcatgagcaacctggctaatagagggggatagcttttggaaacagaagataataccgcatgaatcagagatttcgcatgaagtttttggaaaagg

SEQ ID NO: 431 - DNA, 225 bp, Unknown
  Encodes 16S rRNA from Clostridium sensu stricto
agagtttgatcatggctcaggacgaacgctggcggcatgcttaacacatgcaagtcgaacggactgattccttcgggatgaaagttagtggcgaacgggtgagtaatgtatgagcaacctgcctctatcaacgggataacagttggaaacgactgctaatacggtataagaccacggcaccgcatgatgctgcggtaaaagatttttcggatagagatgggctca

SEQ ID NO: 432 - DNA, 225 bp, Unknown
  Encodes 16S rRNA from Paraeggerthella
agagtttgatcatggctcaggatgaacgctggcggcgtgcctaacacatgcaagtcgaacggagaacccgccctcgggcggttatgaagtggcgaacgggtgagtaacacgtgaccaacctgccccgcgctcagggacagcctcgggaaaccgggattaatacctgatgcgcccccgcccccgcatgggggaggggggaaagcccaggcggcgcgggatggggtc

SEQ ID NO: 433 - DNA, 225 bp, Unknown
  Encodes 16S rRNA from Clostridium XlVa
agagtttgatcatggctcaggatgaacgctggcggcgtgcttaacacatgcaagtcgaacgaggttgttagaatgaagcagcttgctgtgaatttctagccaccgagtggcggacgggtgagtaacgcgtgggtaacctgccctacagtgggggacaacagttggaaacgactgctaataccgcataagcgcacagtatcgcatgatacagtgtgaaaaactccg

SEQ ID NO: 434 - DNA, 225 bp, Unknown
  Encodes 16S rRNA from Clostridium XlVa
agagtttgatcatggctcaggatgaacgctggcggcgtgcctaacacatgcaggtcgaacgggacctatgtagatcaagacttcggtcaagtgaaatttaggtttagtggcggacgggtgagtaacgcgtgagcaatctgccgtatgcagggggacaacagagggaaacttctgctaataccgcataagcgcacggtatcgcatggtacagtgtgaaaagctccg

SEQ ID NO: 435 - DNA, 225 bp, Unknown
  Encodes 16S rRNA from Clostridium IV
agagtttgatcatggctcaggacgaacgctggcggcgtgcctaacacatgcaagtcgaacggaaatttttcggcagagattcgtcgaagcttaagaattttagtggcggacgggtgagtaacgcgtgagtaacctgccgatgagagtggaataacgttctgaaaagaacgctaataccgcataatatattggagccgcatgactctgatatcaaagattttatcg

SEQ ID NO: 436 - DNA, 225 bp, Unknown
  Encodes 16S rRNA from Clostridium XlVa
agagtttgatcatggctcaggatgaacgctggcggcgtgcctaacacatgcaagtcgaacgaggctctgcgaaatgaagattcgtctgaatttcaaggatgtccgagtggcggatgggtgagtaacgcgtggagaacctgccctatgctgggggataacagctggaaacggttgacaataccgcataagcttctttggtcgcatgaccttggaaggaaagattta

SEQ ID NO: 437 - DNA, 225 bp, Unknown
  Encodes 16S rRNA from Adhaeribacter
agagtttgatcatggctcaggatgaacgctggcggcaggcttaatacatgcaagtcgaacggtaaggtctgaagtagcaatactaaagatacacgagtggcgcacgggtgcgtaacgcgtatgtaatctacccttaaccggaacaaaacagttggaaacgactgctaatattccatagtcattagttaaggcatcttaaagaatgtaaagatttattggttaagg

SEQ ID NO: 438 - DNA, 225 bp, Unknown
  Encodes 16S rRNA from Syntrophococcus
agagtttgatcatggctcaggatgaacgctggcggcgtgcctaacacatgcaagtcgaacgaggctcttttctcagatgtttcgactgaagagagaagatcaccgagtggcggatgggtgagtaacgcgtggagaacctgcccttatcagggggataacaactggaaacggttgacaataccgcatatagtgcttgatcgcatgttcttgcacggaaagatttat

SEQ ID NO: 439 - DNA, 225 bp, Unknown
  Encodes 16S rRNA from Clostridium sensu stricto
agagtttgatcatggctcaggacgaacgctggcggcgtgcttaacacatgcaagtcgaacgaggcaagttccttcggggacttaccgagtggcggacgggtgagtaacgcgtgagcaatctgtcccagacagggggataacaactggaaacagttgctaataccgcataagaccacggagccgcatggctttgaggtaaaaggagcgatccggtttggggtgagt

SEQ ID NO: 440 - DNA, 225 bp, Unknown
  Encodes 16S rRNA from Saccharofermentans
agagtttgatcatggctcaggatgaacgctggcggcgtgcataacacattcaagtcgaacggactgatttgatagcttgctattgatgaaagttagtggcggacgggtgagtaacgcgtgagcaacctgcccctatgtgcgggataacgtttggaaacggacgctaataccgcataatccaattggatcgcatggtctggttggcaaagatttattgcataggga

SEQ ID NO: 441 - DNA, 225 bp, Unknown
  Encodes 16S rRNA from Clostridium IV
agagtttgatcatggctcaggacgaacgctggcggcgtgcctaacacatgcaagtcgaacggagttattcgagatgaagttttcggatggaattttggataacttagtggcggacgggtgagtaacgcgtgagtaacctgcccataagagggggataacgttctgaaaagaacgctaataccgcatgacatatttggttcgcatgaatcgaatatcaaaggagca

SEQ ID NO: 442 - DNA, 225 bp, Unknown
  Encodes 16S rRNA from Clostridium IV
agagtttgatcatggctcaggatgaacgctggcggcgtgcttaacacatgcaagtcgaacgaggttagcggcttcggctgttaaccgagtggcggacgggtgagtaacgcgtgaacaatctgtcctgcaaagggggataccaactggaaacagttgctaataccgcataagaccacggcctcgcatggggctgaggtaaaagcagcgatgcgatgcagggtgagt

SEQ ID NO: 443 - DNA, 225 bp, Unknown
  Encodes 16S rRNA from Clostridium sensu stricto
agagtttgatcctggctcaggacgaacgctggcggcatgcctaacacatgcaagtcgaacgagatagcaatatctagtggcgaacgggtgagtaacacgtgagcaatctgccccatatacagggataacagttagaaatgactgctaataccggataagaccacagcctggcatcgggcaggggtcaaagcgatttagcgatatgggatgagctcgcgtccaatt

SEQ ID NO: 444 - DNA, 225 bp, Unknown
  Encodes 16S rRNA from Coraliomargarita
agagtttgatcctggctcagagtgaacgctggcggcgtggctaagacatgcaagtcgagcgagaaggtgccttcgggtgccggaaagcggcaaacgggtgcgtaacacgtaagtaacctgcccttaagacgggaatagttcgatgaaaattgagataatgcccgatatcaacttctttcgcatggaagaggtttgaaaggtttgtgatgacgcttaaggaggggc

SEQ ID NO: 445 - DNA, 185 bp, Unknown
  Encodes 16S rRNA from Sharpea
agagtttgatcatggctcaggatgaacgctggcggcgtgcttaacacatgcaagttgaacgaggaaggccttcgggtcgtaaagttctgttgcgaaggaagaacgccggagggaggaaatggcctccgggtgacggtacttcgcgagaaagccacggctaactacgtgccagcagccgcggtaat

SEQ ID NO: 446 - DNA, 225 bp, Unknown
  Encodes 16S rRNA from Clostridium IV
agagtttgatcatggctcaggattaacgctggcggcgtgcataacacattcaagtcgaacggagtattgctttcgggtgatactcagtggcggacgggtgagtaacgcgtgagcaatctgccccttattgcgggataacagagagaaatttctgctaatacggcataacgcatcggtatcgcatggtacgggtgccaaagatttatcgatgagggatgagctcgc

SEQ ID NO: 447 - DNA, 225 bp, Unknown
  Encodes 16S rRNA from Anaerovorax
agagtttgatcctggctcaggatgaacgctggcggcgtgcctaacacatgcaagtcgagcgagaaacctgtaattgacgcttcggttgattttacaggcggaaagcggcggacgggtgagtaacgcgtaggcaacctgccctttgcacagggatagcctcgggaaaccgggattaaaacctgatgataccgagacaccacatggtgttccggccaaagatttatc

SEQ ID NO: 448 - DNA, 225 bp, Unknown
  Encodes 16S rRNA from Blautia
agagtttgatcatggctcaggatgaacgctggcggcgtgcctaacacatgcaagtcgaacgggtctaaagttttggaggcttcggccaaagaggctctagattagtggcggacgggtgagtaacgcgtggagaacctgccctgtactgggggataacagtgagaaatcactgctaataccgcataagcgcacgaggccgcatggccctgtgtgaaaaactccggt

SEQ ID NO: 449 - DNA, 225 bp, Unknown
  Encodes 16S rRNA from Clostridium XlVa
agagtttgatcatggctcaggatgaacgctggcggcgtgcctaacacatgcaagtcgaacgagcgagagatgaaacctagtgaatttcgagcgagtggcggacgggtgagtaacgcgtgggtaacctgccttacagagggggataacagtttgaaaagactgctaataccgcataagcacacagtaccgcatggtacagggtgaaaagatttatcactgtaagat

SEQ ID NO: 450 - DNA, 225 bp, Unknown
  Encodes 16S rRNA from Clostridium IV
agagtttgatcatggctcaggatgaacgctggcggcgtgcataacacattcaagtcgaacgaagcaccggcgaggaagtcttcggatggaattgcttttgacttagtggcggacgggtgagtaacgcgtgagcaaccttcctgtttgtgagggataacacagggaaacttgtgctaataccgcatgacgcatgggaatcgcatggtttcgatgccaaagatttat

SEQ ID NO: 451 - DNA, 225 bp, Unknown
  Encodes 16S rRNA from Anaerovorax
agagtttgatcatggctcaggatgaacgctggcggcgtgcctaacacatgcaagtcgagcgggagtatcgcaaacagagattcgtcaaagtgagcgatatgagagcggcggacgggtgagtaacgcgtaggtaacctaccttaagctgagggataacccagggaaacttgggataataccacataacgcggtgaagtcacatggctttaccgccaaagatttatc

SEQ ID NO: 452 - DNA, 225 bp, Unknown
  Encodes 16S rRNA from Coraliomargarita
agagtttgatcctggctcagagtgaacgctggcggcgtggctaagacatgcaagttgagcgagaatataccttcgggtatagggaagcggcaaacgggtgagtaacacgtaagtaacctacccttgagactgggatagctcagcgaaagttgaggtaataccggatgccaaccattaatgcatgttaatggattgaaagggatgagacgatgctcaaggaggggc

SEQ ID NO: 453 - DNA, 225 bp, Unknown
  Encodes 16S rRNA from Lachnospiracea incertae sedis
agagtttgatcctggctcaggatgaacgctggcggcgtgcttaacacatgcaagtcgaacggaacatttcgcccgatgattgagaaagcttgcttcctcctgattcaactgaaatgtttagtggcggacgggtgagtaacgcgtgggtaacctaccttacacagggggataacagttagaaatgactgctaataccgcataagcgcacagtaccgcatggtacag

SEQ ID NO: 454 - DNA, 225 bp, Unknown
  Encodes 16S rRNA from Aquiflexum
agagtttgatcatggctcaggatgaacgctggcggcaggcttaatacatgcaagtcgaacggtaaggcctgaagtggcaacacggagggtacacgagtggcgcacgggtgcgtaacgcgtatgcaacctgcccccaaccgggacaaaacagctggaaacggctgctaatatcccatagtcatgaggaggggcatccctctttatgtaaagattcattggttgggg

SEQ ID NO: 455 - DNA, 225 bp, Unknown
  Encodes 16S rRNA from Pedobacter
agagtttgatcatggctcaggatgaacgctagcggcaggcctaatacatgcaagtcgaacgggaaggggcccttcggggcctctgagagtggcgcacgggtgcgtaacgcgtatgcaaccaaccccgcactgggggacagccggtggaaacgccgggtaataccccatgccgacgggaggggacatccccatccgttgaaaggcttcggtcggtgcgggacgggc

SEQ ID NO: 456 - DNA, 225 bp, Unknown
  Encodes 16S rRNA from Robinsoniella
agagtttgatcctggctcaggatgaacgctggcggcgtgcctaacacatgcaagtcgaacggagtaacaattcttcggaaatgttacttagtggcggacgggtgagtaacgcgtgggtaacctgcctcatacagggggatagcagctggaaacggctgataataccgcataagcgcacagagacgcatgtttcagtgtgaaaaactccggtggtatgagatggac

SEQ ID NO: 457 - DNA, 225 bp, Unknown
  Encodes 16S rRNA from Pelomonas
agagtttgatcatggctcagattgaacgctggcggcatgccttacacatgcaagtcgaacggtaacaggttaagctgacgagtggcgaacgggtgagtaatatatcggaacgtgcccagtcgtgggggataactgctcgaaagagcagctaataccgcatacgacctgagggtgaaagcgggggatcgcaagacctcgcgcgattggagcggccgatatcagatt

SEQ ID NO: 458 - DNA, 225 bp, Unknown
  Encodes 16S rRNA from Saccharofermentans
agagtttgatcatggctcaggatgaacgctggcggcgtgcttaacacatgcaagtcgaacggagtttagtggaatgcgacttcggtcaaatgaaattaaacttagtggcggacgggtgagtaacgtgtgagcaacctgcctttcagagggggataacgcagagaaatttgcgctaataccgcatgacatgtcggaatcgcatggatctgacatcaaaggagcaat

SEQ ID NO: 459 - DNA, 225 bp, Unknown
  Encodes 16S rRNA from Paracoccus
agagtttgatcctggctcagaacgaacgctggcggcaggcctaacacatgcaagtcgagcgaggacttcggtcctagcggcggacgggtgagtaacgcgtgggaacgtgccccttgctgcggaatagccccgggaaactgggattaataccgcatgatccccctgatcatggagatctgggggcaaagatttatcggcaagggatcggcccgcgttggattaggt

SEQ ID NO: 460 - DNA, 225 bp, Unknown
  Encodes 16S rRNA from Enterorhabdus
agagtttgatcatggctcaggatgaacgctggcggcgtgcctaacacatgcaagtcgaacggttaaaccggcttcggccggacatagagtggcgaacgggtgagtaacacgtgaccaacctgccccgcgcaccgggatagccccccgaaagggggattaataccggatgcgccggccgggccgcatggcccggccgggaaagcccaggcggcgcgggatggggtc

SEQ ID NO: 461 - DNA, 225 bp, Unknown
  Encodes 16S rRNA from Beijerinckia
agagtttgatcatggctcagagcgaacgctagcggaatgctttatacatgcaagtcgaacggaaaattaaatgaagtagcaatatggatttgaagtttttagtggcgaacgggtgagtaatatataggaatttgcccagtagtggggaacaacagatagaaatgtctgctaataccgcatacgtccgagaggagaaagtcacaagacgctattggagaagcctat

SEQ ID NO: 462 - DNA, 225 bp, Unknown
  Encodes 16S rRNA from Sporobacter
agagtttgatcctggctcaggacgaacgctggcggcgtgcctaacacatgcaagtcgaacgggatcctcatgaaggagttttcggacaacggaatggggcatctagtggcggacgggtgagtaacgcgtgagcaacctgcccttcggagggggacaacagttggaaacgactgctaataccgcataacatataccggtggcatcatgggtatatcaaagatttat

SEQ ID NO: 463 - DNA, 225 bp, Unknown
  Encodes 16S rRNA from Clostridium IV
agagtttgatcatggctcaggatgaacgctggcggcgtgcataacacattcaagtcgaacggacttagaggggcttgctcctcgaaagttagtggcggacgggtgagtaacgcgtgagcaacctgcctttctccgggggataacattgggaaaccggtgctaataccgcataacgtacagagatcgcatgttttttgtaccaaagattcattggggaaagatggg

SEQ ID NO: 464 - DNA, 225 bp, Unknown
  Encodes 16S rRNA from Bacillus
agagtttgatcctggctcaggatgaacgctggcggcgtgcctaatacatgcaagtcgaacggagtatcttcggatacttagtggcgaacgggtgagtaatacttgaacaacctgcccctttgactgggataaccgtctgaaaagacagctaataccggataggtaatattgaggcatctcgatattattaaagatgggttacatcacattgggatgggttcaagt

SEQ ID NO: 465 - DNA, 225 bp, Unknown
  Encodes 16S rRNA from Saccharofermentans
agagtttgatcctggctcaggacgaacgctggcggcgtgcttaacacatgcaagtcgagcgaggggatacggcttcggctgtagactcgagcggcggacgggtgagtaacgcgtgaacgatctgtcccatacagggggataccacttggaaacaggtgctaataccgcataagaccacgaagctgcatggctttgaggtaaaaggagcgatccggtatggggtga

SEQ ID NO: 466 - DNA, 225 bp, Unknown
  Encodes 16S rRNA from Spirochaeta
agagtttgatcatggctcagaacgaacgctggcggcgcgtcttaagcatgcaagtcgagcgggattgggtagcttgctactcatgagagcggcggactggtgagtaacgcgtgggtgacgtaccctttagacggggatagctcctagaaataggaggtaataccggatacgatagtgagtgtcagaggctcattatgaaaggttcttttgaaccgctgaaggagc

SEQ ID NO: 467 - DNA, 225 bp, Unknown
  Encodes 16S rRNA from Prevotella
agagtttgatcatggctcaggatgaacgctagctacaggcttaacacatgcaagtcgaggggaaacgatgagagagcttgctctctcaggcgtcgaccggcgcacgggtgagtaacacgtatccaacctgcctttttccagggaataaccttgcgaaagtaagactaatgccctatgtgtcctttgacggcatcagacgaggacgaaagatttatcggaaaggga

SEQ ID NO: 468 - DNA, 225 bp, Unknown
  Encodes 16S rRNA from Eubacterium
agagtttgatcatggctcaggattaacgctggcggcgtgcctaacacatgcaagtcgagcgagaaatggtgaaatgaaacttcggtagattagatccatggacagcggcggacgggtgagtaacgcgtgggcaacctgcccctttccggaggatagccaagggaaactttgaataatactccataaagcaagagtaccgcatgatacacttgccaaagatttatc

SEQ ID NO: 469 - DNA, 225 bp, Unknown
  Encodes 16S rRNA from Herbiconiux
agagtttgatcctggctcaggacgaacgctggcggcatgcctaacacatgcaagtcgaacggacgagggtagcaatacccaagttagtggcgaacgggtgagtaacacgtgagcaacctgccctttacactgggatagcagttggaaacgactgataataccggataagaccacgctcccgcatgggagaggggtcaaagtgaattagcggtaaaggatgggctc

SEQ ID NO: 470 - DNA, 225 bp, Unknown
  Encodes 16S rRNA from Brevundimonas
agagtttgatcctggctcagagcgaacgctggcggcaggcctaacacatgcaagtcgaacggacccttcggggttagtggcggacgggtgagtaacacgtgggaacgtgcctttaggttcggaatagctcctggaaacgggtggtaatgccgaatgtgcccttcgggggaaagatttatcgcctttagagcggcccgcgtctgattagctagttggtgaggtaat

SEQ ID NO: 471 - DNA, 225 bp, Unknown
  Encodes 16S rRNA from Mogibacterium
agagtttgatcatggctcaggatgaacgctggcggcgtgcctaatacatgcaagtcgagcgagaatctctgacatgacgcttcggttgattggaagagaggacagcggcggacgggtgagtaacgcgtaggcaacctgcccccgacagagggatagccattggaaacgatgattaaaacctcataacgctcgtatgacacatgtcatatgagccaaagatttatc

SEQ ID NO: 472 - DNA, 225 bp, Unknown
  Encodes 16S rRNA from Anaerorhabdus
agagtttgatcatggctcaggattaacgctggcggcgtgcctaatacatgcaagtcgtacgggtgattctagcttgctagatgatccagtggcgaacgggtgagtaatacataaacaacctacctataaggactgggataacgcttggaaacgagtgctaataccggataggtaacgggagggcatcctcctgttattaaaggattactacacaaatagatgggt

SEQ ID NO: 473 - DNA, 225 bp, Unknown
  Encodes 16S rRNA from Victivallis
agagtttgatcctggctcagaacgaacgctggcggcatggattaggcatgcaagtcgaacgaagcagcaatgcttagtggcggaagggtgaggaacgcgtgagtaatctgcccccaagttgggaataacagctggaaacggctgctaataccgaatgtggctgtcgggtcgcatgatctgacagttaaagatttattgcttggggatgagctcgcgtcccattag

SEQ ID NO: 474 - DNA, 225 bp, Unknown
  Encodes 16S rRNA from Prevotella
agagtttgatcatggctcaggatgaacgctagctacaggcctaacacatgcaagtcgaggggcagcatgggagaagcttgcttttcccgatggcgaccggcgaatgggtgagtcacgcgtgtccaacctgcctccggcccggggatagcccttggaaatgaggattaagacccgataggtggagcttccgcatggcggctccatgaaacgagaccggagatgggg

SEQ ID NO: 475 - DNA, 225 bp, Unknown
  Encodes 16S rRNA from Anaerovorax
agagtttgatcctggctcaggatgaacgctggcggcgtgcctaacacatgcaagtcgagcgggaaatacggaaatgaaggttcgctggaatttctgtatggagagcggcggacgggtgagtaacgcgtaggcaacctgccctttgcagagggatagccactggaaacggtgattaaaacctcataatgccatttgttcacatgttcagatggccaaagatttatc

SEQ ID NO: 476 - DNA, 225 bp, Unknown
  Encodes 16S rRNA from Aquiflexum
agagtttgatcatggctcaggatgaacgctggcggcaggcttaatacatgcaagtcgaacggtaaggcctgaagtggcaacacggagggtacacgagtggcgcacgggtgcgtaacgcgtatgcaacctgcccctaaccgggacaaaacagctggaaacggctgctaatatcccatggccacacgagggggcatccccatgtgtgtaaagattcattggttaggg

SEQ ID NO: 477 - DNA, 225 bp, Unknown
  Encodes 16S rRNA from Oscillibacter
agagtttgatcctggctcaggacgaacgctggcggcgtgcctaacacatgcaagtcgaacggagtgatttggattcgtctggatcacttagtggcggacgggtgagtaacgcgtgagcaacctgcccttcagagggggacaacagttggaaacgactgctaataccgcataatatatacttaaggcatcttaggtatatcaaagattttatcgctgaaggatggg

SEQ ID NO: 478 - DNA, 225 bp, Unknown
  Encodes 16S rRNA from Altererythrobacter
agagtttgatcctggctcagaacgaacgctggcggcacgcttaacacatgcaagtcgaacgagattgcgggttcgctcgtaatttagtggcgcacgggtgaggaacgcgtgactacctgcctgttgatggtggataactccgggaaactggagctaatacagcataagctcgagagaggaaagacaaaagtcgtcgacagagggggttgcgtctgattaggtagt

SEQ ID NO: 479 - DNA, 225 bp, Unknown
  Encodes 16S rRNA from Hydrogenoanaerobacterium
agagtttgatcctggctcaggacgaacgctggcggcacgcttaacacatgcaagtcgaacgaagcttgggagcttgctttcaagcttagtggcggacgggtgagtaacacgtgagcaacctgccttcaggtgtggaataatggttggaaacggccactaataccgcataatgcagcgggatcgcatgatcctgctgccaaaggtttactgcctgaagatgggctc

SEQ ID NO: 480 - DNA, 225 bp, Unknown
  Encodes 16S rRNA from Clostridium III
agagtttgatcatggctcaggacgaacgctggcggcgtgcctaacacatgcaagtcgaacgagaagtcttgaaatgatcccttcggggtgaatggatagatggacagtggcggacgggcgagtaacgcgtgagtaacctgcccataagagagggatagccgatggaaacgtcgagtaatacctcatattgtaattaattcgcatggattgattatgaaagattta

SEQ ID NO: 481 - DNA, 225 bp, Unknown
  Encodes 16S rRNA from Clostridium XlVb
agagtttgatcctggctcaggatgaacgctggcggcgtgcctaacacatgcaagtcgagcgaagcataggtgcttgcacttatgacttagcggcggacgggtgagtaacgcgtgggtaacctgccctgtacaggggaataacagttagaaatgactgctaatgccccataagccgacgtaatggcatctttatgtcggaaaagatttatcggtacaggagggacc

SEQ ID NO: 482 - DNA, 225 bp, Unknown
  Encodes 16S rRNA from Saccharofermentans
agagtttgatcatggctcaggacgaacgctggcggcgtgcctaacacatgcaagtcgagcggggacagcggattagcttgctaagctgctgttccagcggcggacgggtgagtaacgcgtgaacaatctgtcccagacagggggataacacttggaaacaggtgctaataccgcataagaccacagtgccgcatggcagaggggtaaaaggagcaatccggtctg

SEQ ID NO: 483 - DNA, 225 bp, Unknown
  Encodes 16S rRNA from Roseburia
agagtttgatcatggctcaggatgaacgctggcggcgtgcttaacacatgcaagtcgaacgaatttctttcggaacgcggcttcggccaagggaagagagaagtgagtggcggacgggtgagtaacgcgtgggtaacctgcctcacatcgggggataccagtcggaaacgactgctaaaaccgcataagaccacggtatcgcatgatactgaggccaaaactccg

SEQ ID NO: 484 - DNA, 225 bp, Unknown
  Encodes 16S rRNA from Anaeroplasma
agagtttgatcatggctcaggattaacgctggcggcatgcctaatacatgcaagtcgaatgagaagcttgcttctcatggcgaacgggtgagtaacacgtaggtaacctgccttacactcgaggataaccgttggaaacgacggataatactggataggacaaagattcgcatgaatcgttgtttaaaagcaatggtgtatgaggggcctgcggtgcattagcta

SEQ ID NO: 485 - DNA, 225 bp, Unknown
  Encodes 16S rRNA from Planctomyces
agagtttgatcctggctcagaatgaacgttggcggcatggattaggcatgcaagtcgtacggtgaaggggagcttgctcctctgatcagtggcgaaagggatagtaacgcgtagataccaccctcctggacggggatagctgcgggaaactgcaggtaatacccgataatgacgagagtccaaaggtgtaattccttcaggagacggatctgcgtcctaccagat

SEQ ID NO: 486 - DNA, 225 bp, Unknown
  Encodes 16S rRNA from Ruminococcus
agagtttgatcctggctcaggacgaacgctggcggcacgcttaacacatgcaagtcgaacggagataatggatttattcgttatcttagtggcggacgggtgagtaacacgtgagcaacctgcctttaagagggggatagcttctggaaacggatggtaataccctataaaatatatttaaggcatcttaggtatatcaaagatttatcacttaaagatgggctc

SEQ ID NO: 487 - DNA, 225 bp, Unknown
  Encodes 16S rRNA from Selenomonas
agagtttgatcctggctcaggacgaacgctggcggcgtgcttaacacatgcaagtcgaacgagaaaatattggaagcttgcttttgatagattcgagtggcaaacgggtgagtaacgcgtagacaacctgccgcaaagatggggacaacagatcgaaaggtctgctaataccgaatgttgcggagctcccgcatgggagctccgccaaagatggcctctacttgt

SEQ ID NO: 488 - DNA, 225 bp, Unknown
  Encodes 16S rRNA from Anaeroplasma
agagtttgatcatggctcaggattaacgctggcggcgtgcctaatacatgcaagtcgaatggtagtagcaatacaaaccatggcgaacgggtgagtaacacgtaggtaacctgtctttaagacgaggataaccgttggaaacgacggataatactggataggacattacaaggggcatcccaaaatgtttaaagattattatgtcacttagagaggggcctgcgg

SEQ ID NO: 489 - DNA, 225 bp, Unknown
  Encodes 16S rRNA from Anaerovorax
agagtttgatcatggctcaggatgaacgctggcggcgtgcctaacacatgcaagtcgagcgggaaatctcggaaataagcttcggcagaaataagagatggatagcggcggacgggtgagtaacgcgtaggtaacctgccctttgcagagggatagcctagggaaacctggattaataccacataatgcagtctggtcacatggcgaggctgccaaagatttatc

SEQ ID NO: 490 - DNA, 225 bp, Unknown
  Encodes 16S rRNA from Rummeliibacillus
agagtttgatcctggctcaggacgaacgctggcggcgtgcctaatacatgcaagtcgagcgaatgacgagaagcttgcttctctgatttagcggcggacgggtgagtaacacgtgggcaacctgccctgtagactgggataacttcgggaaaccggagctaataccggataattcttttagcctcatggctttaagctaaaaggcgcttcggcgtcactacagga

SEQ ID NO: 491 - DNA, 225 bp, Unknown
  Encodes 16S rRNA from Clostridium XlVa
agagtttgatcctggctcaggatgaacgctggcggcgtgcctaacacatgcaagtcgaacgaggtgcagtaaacggagattcgtcgaagggaactgtatccgagtggcggatgggtgagtaacgcgtggagaacctgcccttatcagggggataacaactggaaacggttgacaataccgcataagcttcggttatcgcatgatagcagaaggaaagatttatcg

SEQ ID NO: 492 - DNA, 225 bp, Unknown
  Encodes 16S rRNA from Anaeroplasma
agagtttgatcctggctcaggattaacgctggcggcgtgcctaatacatgcaagtcgaatggttagcttgctaaccatggcgaacgggtgagtaacacgtaggtaacctgtcttttagccgaggataaccattggaaacgatggataatactggataggacatttgaaggcatctttggatgtttaaagatttatcactagaagaggggcctgcggcgcattagc

SEQ ID NO: 493 - DNA, 225 bp, Unknown
  Encodes 16S rRNA from Butyrivibrio
agagtttgatcctggctcaggatgaacgctggcggcgtgcctaacacatgcaagtcgaacggagtttgtagaacggaagtcttcggatggaagatttataaacttagtggcggacgggtgagtaacgcgtgggtaacctgcctcgtacagggggatagcagctggaaacggctggtaaaaccgcataagcgcacaacttcgcatgaaggagtgtgaaaatattta

SEQ ID NO: 494 - DNA, 225 bp, Unknown
  Encodes 16S rRNA from Lachnospiracea incertae sedis
agagtttgatcctggctcaggatgaacgctggcggcgtgcctaacacatgcaagtcgaacgggaaccttgtgacggagacttcggttgaagaagcaagaattctagtggcggacgggtgagtaacgcgtgggtaacctgcccttaagaggcgaataacagtgagaaatcactgctaatacgccatatgcttacggaatcgcatgattttgtgaggaaaagaattt

SEQ ID NO: 495 - DNA, 225 bp, Unknown
  Encodes 16S rRNA from Anaerotruncus
agagtttgatcatggctcaggacgaacgctggcggcgtgcctaacacatgcaagtcgaacgaagttattacgctgaaatgatattagcttgctaaaggaatttcttgtaatgcttagtggcggacgggtgagtaacgcgtgagcaacctgcctttcagagggggacaacagttggaaacgactgctaataccgcataacattgtttaaagacatctttagataat

SEQ ID NO: 496 - DNA, 225 bp, Unknown
  Encodes 16S rRNA from Syntrophococcus
agagtttgatcctggctcaggatgaacgctggcggcgtgcctaacacatgcaagtcgaacgaggctcttctctctgacgtttcgactgattagagaagatcaccgagtggcggatgggtgagtaacgcgtggagaacctgcccccatcagggggataacaactggaaacggttgataataccgcatatatgacaagaccgcatgatcttgtcaggaaagatttat

SEQ ID NO: 497 - DNA, 225 bp, Unknown
  Encodes 16S rRNA from Paraeggerthella
agagtttgatcctggctcaggatgaacgctggcggcgtgcctaacacatgcaagtcgaacggttaaaccggcttcggccggacataaagtggcgaacgggtgagtaacacgtgaccaacctgccccgcgcaccgggacagccccccgaaagggggattgataccggatgctccgccccctccgcatggcgggggcgggaaagcccaggcggcgcgggatggggtc

SEQ ID NO: 498 - DNA, 225 bp, Unknown
  Encodes 16S rRNA from Papillibacter
agagtttgatcatggctcaggataaacgctggcggcgtgcttaacacattcaagtcgaacggacgacagggggcttgctccctgaagttagtggcggacgggtgagtaacgcgtgagcaacctgccttttttcgggggataacacggggaaaccggtgctaataccgcataacgtaccgagatcgcatggtcatggtaccaaaggagcaatccgaggaaagatgg

SEQ ID NO: 499 - DNA, 225 bp, Unknown
  Encodes 16S rRNA from Lachnospiracea incertae sedis
agagtttgatcctggctcaggatgaacgctggcggcgtgcctaacacatgcaagtcgagcggacttatgacaagattcttcggatgatttttataagttagcggcggatgggtgaggaacgcgtggagaacctgcccttcacagggggataacagttggaaacgactgttaataccgcatatgctcacgtgaccgcatggtcgagtgaggaaagctccggcggtg

SEQ ID NO: 500 - DNA, 225 bp, Unknown
  Encodes 16S rRNA from Prevotella
agagtttgatcctggctcaggatgaacgctagctacaggcttaacacatgcaagtcgaggggcatcaggtactgtgcttgcacagtatgctggcgaccggcgcacgggtgagtaacgcgtatccaaccttcccatgactccggttcagcccgccgaaaggcggattactcccggatggtttccgaagagggcctctgatttggaataaagatttatcggtcatgg

SEQ ID NO: 501 - DNA, 225 bp, Unknown
  Encodes 16S rRNA from Papillibacter
agagtttgatcctggctcaggacgaacgctggcggcgtgcctaacacatgcaagtcgaacggagcgagaggagcttgctcttctcgcttagtggcggacgggtgagtaacgcgtgagcaacctggctttcagaggggaataacacagtgaaaactgtactaataccgcataacgtctcttgggcgcatgcccgagggaccaaaggagcaatccgctgaaagatgg

SEQ ID NO: 502 - DNA, 225 bp, Unknown
  Encodes 16S rRNA from Streptococcus
agagtttgatcctggctcaggatgaacgctggcggcgtgcttaatacatgcaagtcgaacggatgattcttccagcttgctggaagatgattcagtggcgaacgggtgagtaatacgtaggcaacctgccccaaagcgggggatagcagttggaaacgactattaataccgcataggtaatcttaaggcatcttgagattattaaaggtgcgtttgcaccgctgt

SEQ ID NO: 503 - DNA, 225 bp, Unknown
  Encodes 16S rRNA from Methanobrevibacter
agagtttgatcatggcagatgttactgctattgggattcgattaagccatgcaagtcgaacgaatttagattcgtggcgtacggctcagtaacacgtggataacctacccttaggaccgggataaccttgggaaactgaggataatactggataggcaattattcctgtaatggttttttgtttaaatgttttttcgcctaaggatgggtctgcggccgattagg

SEQ ID NO: 504 - DNA, 225 bp, Unknown
  Encodes 16S rRNA from Prevotella
agagtttgatcatggctcaggatgaacgctagctacaggcttaacacatgcaagtcgaggggcatcatggcggtggcttgccaccgctgatggcgaccggcgcacgggtgagtaacgcgtatccaacctgcccccaaccgcggcacagcccgccgaaaggcggattaattccgcatgtggtcgtgatgtgacatcttttcacgactaaaggttcactccggttgg

SEQ ID NO: 505 - DNA, 225 bp, Unknown
  Encodes 16S rRNA from Prevotella
agagtttgatcatggctcaggatgaacgctagctacaggcttaacacatgcaagtcgaggggcagcgagggggcagcaatgcccctgtcggcgaccggcgcacgggtgagtaacgcgtatccaacctgccccatggtagggaatagcccggagaaatccggattaatgccctatgttctccgacgatggcatctgacttggagcaaagatttatcgccatgggat

SEQ ID NO: 506 - DNA, 225 bp, Unknown; identical to SEQ ID NO: 474
  Encodes 16S rRNA from Prevotella

SEQ ID NO: 507 - DNA, 225 bp, Unknown
  Encodes 16S rRNA from Coraliomargarita
agagtttgatcatggctcagagtgaacgctggcggcgtggctaagacatgcaagttgagcgagaatatgcctttgggcatagggaagcggcaaacgggtgagtaacacgtaagtaacctacccttaagactgggatagccctgtgaaagtgggggtaataccggatgaggactatgactgcatggttatagatcgaaaggtttgtaaaggcgcttaaggaggggc

SEQ ID NO: 508 - DNA, 225 bp, Unknown
  Encodes 16S rRNA from Prevotella
agagtttgatcctggctcaggatgaacgctagctacaggcttaacacatgcaagtcgcggggcagcatgttgtgtgcttgcacacaatgatggcgaccggcgcacgggtgcgtaacgcgtatccaacctgccccttactctggaatagcccggcgaaagtcggattaatgccggatgttgtcagatgaggacatctgagtttgaccaaaggccctttgggtcggt

SEQ ID NO: 509 - DNA, 225 bp, Unknown
  Encodes 16S rRNA from Thermotalea
agagtttgatcctggctcaggattaacgctggcggcgtgcctaacacatgcaagtcgagcgagaaatagtgaagagatacttcggttgaacggatctatggacagcggcggacgggtgagtaacgcgtgggcaacctacccctttcccgaggatagccaagggaaactttgaataatactccataaagcagatgtaccgcatgatacgactgccaaagatttatc

SEQ ID NO: 510 - DNA, 225 bp, Unknown
  Encodes 16S rRNA from Clostridium XlVa
agagtttgatcatggctcaggatgaacgctggcggcgtgcttaacacatgcaagtcgaacgaagcaggtttgaaggagacttcggtcaatggatgatctgacttagtggcggacgggtgagtaacgcgtgggcaacctgcctcatggagggggacaacagttggaaacgactgctaataccgcataagaccaagcatcgcatgatgcaatggtaaaagatttatc

SEQ ID NO: 511 - DNA, 225 bp, Unknown
  Encodes 16S rRNA from Atopobium
agagtttgatcatggctcaggatgaacgctggcggcgcgcctaacacatgcaagtcgaacggttaaagccccttcgggggtgtataaagtggcgaacggctgagtaacacgtgggcaacctacctctcactccgggatagcctcgagaaatcgtggataataccggatactccaggataatcgcatggttttcctgggaaagccccgacggtgagagatgggccc

SEQ ID NO: 512 - DNA, 225 bp, Unknown
  Encodes 16S rRNA from Prevotella
agagtttgatcatggctcaggatgaacgctagctacaggcttaacacatgcaagtcgaggggtaacatgacgaaagcttgcttttgttgatgacgaccggcgcacgggtgagtaacgcgtatccaacctgccctgtactacgggatagcccggcgaaagtcggattaataccgtatgtggtgtgataaagacatctgcattacactaaagatttatcggtacagg

SEQ ID NO: 513 - DNA, 225 bp, Unknown
  Encodes 16S rRNA from Mogibacterium
agagtttgatcatggctcaggatgaacgctggcggcgtgcctaatacatgcaagtcgagcgagaagctactttgaagcgttttcgaacaattctgtgtagtggaaagcggcggacgggtgagtaacgcgtaggcaacctgcccttagcagagggatagccattggaaacgatgattaaaacctcataatgccaacttaacacatgttgagctggccaaagattta

SEQ ID NO: 514 - DNA, 225 bp, Unknown
  Encodes 16S rRNA from Clostridium XlVa
agagtttgatcatggctcaggatgaacgctggcggcgtgcttaacacatgcaagtcgaacgaggaattgcgaaagaagttttcggatggattttgcttttccgagtggcggacgggtgagtaacgcgtgggtaacctgccttacactgggggacaacagagagaaatttctgctaataccgcataacccgctatgagcgcatgctcaagacggaaaagatttatc

SEQ ID NO: 515 - DNA, 225 bp, Unknown
  Encodes 16S rRNA from Clostridium XlVa
agagtttgatcctggctcaggatgaacgctggcggcgtgcctaacacatgcaagtcgaacgaagaccccgaggcagagatttcggtcgaagccaagggaggactgagtggcggacgggtgagtaacgcgtggataacctgccccatacagggggatagcagttggaaacgactgataataccgcataagcgcacggggagacatctctttgtgtgaaaagattta

SEQ ID NO: 516 - DNA, 225 bp, Unknown
  Encodes 16S rRNA from Eggerthella
agagtttgatcctggctcaggatgaacgctggcggcgtgcctaacacatgcaagtcgaacggtgaaaccgccctcgggcggacatgaagtggcgaacgggtgagtaacacgtgaccaacctgccccgcgcaccgggacagccccccgaaagggggattaataccggatactccggccgggccgcatggcccggccgggaaagctccggcggcgcgggatggggtc

SEQ ID NO: 517 - DNA, 225 bp, Unknown
  Encodes 16S rRNA from Blautia
agagtttgatcatggctcaggatgaacgctggcggcgtgcctaacacatgcaagtcgaacggagatcatttggaaataagcttcggcagaaagaaggatgatcttagtggcggacgggtgagtaacgcgtggagaacctgccctgtacagggggataacatccagaaatggatgctaaaaccgcataagcgcacatgaccgcatggtcaagtgtgaaaaactccg

SEQ ID NO: 518 - DNA, 225 bp, Unknown
  Encodes 16S rRNA from Vampirovibrio
agagtttgatcatggctcaggacgaacgctggcggtgtgcctcatacatgcaagtcgaacgataaggttccttcgggaatacataagtggcggacgggtgagtacaacataggaaatctgccctaaactgggggacaacagagggaaactcctgctaataccccatacgagcttagttgaaatactaatcttgaaagctccggcggtttaggatgagcctgtgcc

SEQ ID NO: 519 - DNA, 225 bp, Unknown
  Encodes 16S rRNA from Papillibacter
agagtttgatcatggctcaggataaacgctggcggcgtgcttaacacattcaagtcgaacggacgacagggggcttgctccctgaagttagtggcggacgggtgagtaacgcgtgagcaacctgcctttttccgggggataacacggggaaaccggtgctaataccgcataacgtgccgagatcgcatggtcatggtaccaaaggagcaatccggggaaagatgg

SEQ ID NO: 520 - DNA, 225 bp, Unknown
  Encodes 16S rRNA from Beijerinckia
agagtttgatcatggctcagaacgaacgctggcggcaggcttaacacatgcaagtcgaacgccccgcaaggggagtggcagacgggtgagtaacgcgtgggaacataccctttcctgcggaatagctccgggaaactggaattaataccgcatacgccctacgggggaaagatttatcggggaaggattggcccgcgttggattagctagttggtggggtaaagg

SEQ ID NO: 521 - DNA, 225 bp, Unknown
  Encodes 16S rRNA from Bacteroides
agagtttgatcatggctcaggatgaacgctagctacaggcttaacacatgcaagtcgaggggcagcattagattagcttgctaatctagatggcgaccggcgcacgggtgagtaacgcgtatccaacctgccccctacccggggatagccttgcgaaagtaagattaatacccggtgctgttatgattccgcatggggatataacgaaagattcatcggtagggg

SEQ ID NO: 522 - DNA, 225 bp, Unknown
  Encodes 16S rRNA from Desulfotomaculum
agagtttgatcatggctcaggacgaacgctggcggcgtgcttaacacatgcaagtcgaacggagcttaaggaagagcttgctctgagataagcttagtggcggacgggtgagtaacgcgtgaggaacctggtttacacagggggataacggcccgaaagggttgctaataccgcataagaccacaacaccgcatgatgaaggggtcaaaggagaaatccggtgta

SEQ ID NO: 523 - DNA, 225 bp, Unknown
  Encodes 16S rRNA from unknown taxa
agagtttgatcatggctcaggataaacgctggcggcgtgcattatgcatgcaagtcgaacgagatacgcaagtatcgagtggcaaacgggtgagtaacacatagataacctaccctcgagtggggaataattctccgaaaggaggactaataccgcatacgatggcttttcacaagaagagttattaaagcagcaatgcgcttgaggaggggtctgtgtccgatt

SEQ ID NO: 524 - DNA, 225 bp, Unknown
  Encodes 16S rRNA from Clostridium XlVa
agagtttgatcatggctcaggatgaacgctggcggcgtgcttaacacatgcaagtcgaacgaatttctgttagaatgcggcttcggccaagtgaagacagaagtgagtggcggacgggtgagtaacgcgtgggtaacctaccttacacagggggataacgattggaaacgatcgctaataccgcataagaccacagtgccgcatggtacaggggtaaaagattta

SEQ ID NO: 525 - DNA, 225 bp, Unknown
  Encodes 16S rRNA from Clostridium XlVa
agagtttgatcatggctcaggatgaacgctggcggcgtgcctaacacatgcaagtcgaacgggcactggcggaagaagccttcgggtggaagctgccagagctagtggcggacgggtgagtaacgcgtggataacctgccctgttccgggggataacagctggaaacggctgctaataccgcataagcgcacgaggcggcatcgcctagtgtgaaaaactccggt

SEQ ID NO: 526 - DNA, 225 bp, Unknown
  Encodes 16S rRNA from Clostridium XlVa
agagtttgatcatggctcaggatgaacgctggcggcgtgcctaacacatgcaagtcgaacggaaatgatttgatgaaggtttcggttggattcttatcattttagtggcggacgggtgagtaacacgtgggtaacctgccctgtaccgggggataacacttagaaataggtgataataccgcataagcgcacactgacgcatgtcagagtgtgaaaaactccggt

SEQ ID NO: 527 - DNA, 225 bp, Unknown
  Encodes 16S rRNA from Cryptanaerobacter
agagtttgatcatggctcaggacgaacgctggcggcatgcctaacacatgcaagtcgaacggaataagtttggttgtagcgatactttcgaacttatttagtggcgaacgggtgagtaacacgtgagcaacctgccttttacacagggataacagccggaaacggctgctaataccggataagaccacaccgaggcatctcggaggggtcaaagcgcttagcggt

SEQ ID NO: 528 - DNA, 225 bp, Unknown
  Encodes 16S rRNA from Prevotella
agagtttgatcatggctcaggatgaacgctagctacaggcctaacacatgcaagtcgaggggcagcatgtcggtagcttgctaccgatgatggcgaccggcggatgggtgagcaacgcgtatccaacctgccccatgcgcggggatagcccttggaaatgaggattaagccccgatatgcgcattcgccgcatggcgtgtgcgtgaagttgtgcatgggatgggg

SEQ ID NO: 529 - DNA, 225 bp, Unknown
  Encodes 16S rRNA from Syntrophomonas
agagtttgatcatggctcaggacgaacgctggcggcgtgcctaacacatgcaagtcgaacggaaactattcgagaatttcggttcatgaatagttttagtggcggacgggtgagtaacgcgtgagaatctgcctttgagtggggaataacagttggaaacgactgctaataccgcataacatggaaacatcaaagagggtgcaagccctcgctcagagatgagct

SEQ ID NO: 530 - DNA, 225 bp, Unknown
  Encodes 16S rRNA from Erysipelothrix
agagtttgatcatggctcaggatgaacgctggcggcgtgcttaatacatgcaagtcgaacgcacgagattacttcggtgatcgagtgagtggcgaacgggtgagtaatacataaggaacctgcccatcagactgggataacagttggaaacgactgctaataccggataggtagttgagtggcatcacatagctattaaagttgagatacactgatggatggcct

SEQ ID NO: 531 - DNA, 225 bp, Unknown
  Encodes 16S rRNA from Selenomonas
agagtttgatcctggctcaggacgaacgctggcggcgtgcttaacacatgcaagtcgaacgagacgattgaaagcttgcttttgaaagtcgagtggcaaacgggtgagtaacgcgtaggcaacctgcctctaggatggggacaacagtccgaaaggactgctaataccgaatgttgtaggtattccgcatggaatacctattaaagatggcctctacttgtaagc

SEQ ID NO: 532 - DNA, 225 bp, Unknown
  Encodes 16S rRNA from Clostridium III
agagtttgatcatggctcaggacgaacgctggcggcgtgcctaacacatgcaagtcgagcgagaatctttcatttgatcccttcggggtgacgacggaagaggaaagcggcggacgggtgagtaacgcgtgagtaatctgccccatggtggggaataacacagtgaaaactgtgctaatgccccataatgtatacttgttgcatagcagggataccaaagattta

SEQ ID NO: 533 - DNA, 225 bp, Unknown
  Encodes 16S rRNA from Flavobacterium
agagtttgatcctggctcaggatgaacgctagcggcaggcctaacacatgcaagtcgaggggtagagatagcttgctatcttgagaccggcgcacgggtgcgtaacgcgtatgcaatctaccttatactaagggatagcccggagaaatccggattaataccttatggtttttatgaatagcattatttatagaataaagatttatcggtataagatgagcatgc

SEQ ID NO: 534 - DNA, 225 bp, Unknown
  Encodes 16S rRNA from Thermotalea
agagtttgatcctggctcaggatgaacgctggcggcgtgcttaacacatgcaagtcgagcgagaaatgacagacggattcttcggatgacagaagtcatggacagcggcggacgggtgagtaacgcgtgggcaacctgcccctgactgagggatagccgagggaaacttcgagtaatacctcataacgcataactgtcgcatggcagatatgccaaagatttatc

SEQ ID NO: 535 - DNA, 225 bp, Unknown
  Encodes 16S rRNA from Lachnospiracea incertae sedis
agagtttgatcatggctcaggatgaacgctggcggcgcgcttaacacatgcaagtcgaacggaatttgtaacttcggttgtggattcagtggcggacgggtgagtaacacgtggataacttgccttttagtgggggatagctgagagaaatctcaattaataccgcataatgtaatttgttcgcatgaatagattaataaagatgaaaatcgctaagagataggt

SEQ ID NO: 536 - DNA, 225 bp, Unknown
  Encodes 16S rRNA from Mucilaginibacter
agagtttgatcatggctcaggatgaacgctagcggcaggcctaatacatgcaagtcggacgggaactccccttcgggggagtgagagtggcgcacgggtgcgtaacgcgtatgcaaccaaccctcatccgggggacagccggtggaaacgccgggtaataccccatgtccactttgggaggcatcttctgaggtggaaagactttggtcggaggaggacgggcat

SEQ ID NO: 537 - DNA, 225 bp, Unknown
  Encodes 16S rRNA from Bacteroides
agagtttgatcctggctcaggatgaacgctagctacaggcttaacacatgcaagtcgaggggcagcattagattagcttgctaatctagatggcgaccggcgcacgggtgagtaacgcgtatccaacctgccccctacccggggatagccttgcgaaagtaagattaatacccggtgctgttgcgattccgcatggggatgcaacgaaagattcatcggtagggg

SEQ ID NO: 538 - DNA, 225 bp, Unknown
  Encodes 16S rRNA from Ruminococcus
agagtttgatcctggctcaggacgaacgctggcggcacgcttaacacatgcaagtcgaacggagttaaataagcttgcttatttaacttagtggcggacgggtgagtaacacgtgagcaacctgccttacagagaggaataatgattggaaacggtcactaatacctcataaaatatctatactgcatggtattggatatcaaagatttatcgctgtaagatggg

SEQ ID NO: 539 - DNA, 191 bp, Unknown
  Encodes 16S rRNA from Clostridium XlVa
agagtttgatcatggctcaggatgaacgctagctacaggcttaacacatgcaagtcgaggggaaaccctgatgcagcgacgccgcgtgagtgaagaagtatttcggtatgtaaagctctatcagcagggaagaaaatgacggtacctgactaagaagccccggctaactacgtgccagcagccgcggtaat

SEQ ID NO: 540 - DNA, 225 bp, Unknown
  Encodes 16S rRNA from Asaccharobacter
agagtttgatcctggctcaggatgaacgctggcggcgtgcttaacacatgcaagtcgaacgattaagacccttcggggtgaataaagtggcgaacgggtgagtaacacgtgaccaacctgcctcgcactccggaataccttgtggaaacgcaaactaataccggatactccgagctgagcgcatgctctactcgggaaagcctttacggtgcgagatggggtcgc

SEQ ID NO: 541 - DNA, 225 bp, Unknown
  Encodes 16S rRNA from Blautia
agagtttgatcatggctcaggatgaacgctggcggcgtgcctaacacatgcaagtcgaacggggatatgtcggaatgagacttcggttgaaggaagacatatcttagtggcggacgggtgagtaacgcgtggagaacctgcctcatactgggggataccagtgagaaatcactgctaaaaccgcataagcgcacggtaccgcatggtacagtgtgaaaaactccg

SEQ ID NO: 542 - DNA, 225 bp, Unknown
  Encodes 16S rRNA from Mucilaginibacter
agagtttgatcatggctcaggatgaacgctagcggcaggcctaatacatgcaagtcggacgggatctccccttcgggggagtgagagtggcgcacgggtgcgtaacgcgtatgcaaccaaccctcatccgggggacagccggtggaaacgccgggtaataccccatatccacttcgggaggcatcttctgaggtggaaaggctttggtcggaggaggacgggcat

SEQ ID NO: 543 - DNA, 225 bp, Unknown
  Encodes 16S rRNA from Coprococcus
agagtttgatcatggctcaggatgaacgctggcggcgtgcttaacacatgcaagtcgaacggacttaaggcgctgacgagacttcggtcaaatcttgtcttaagttagtggcggacgggtgagtaacgcgtgggtaacctgccgtatgccgggggacaacagttggaaacgactgctaataccgcataagcgcacggggaggcatctttccgtgtgaaaaactcc

SEQ ID NO: 544 - DNA, 225 bp, Unknown
  Encodes 16S rRNA from Lachnospiracea incertae sedis
agagtttgatcctggctcaggatgaacgctggcggcgtgcttaacacatgcaagtcgaacggaacattccacccgaagaatgaagaagcttgcttcggaatgattcaaccggaatgtttagtggcggacgggtgagtaacgcgtgggtaacctaccttacacagggggataacagttagaaatgactgctaataccgcataagcgcacagtaccgcatggtacgg

SEQ ID NO: 545 - DNA, 225 bp, Unknown
  Encodes 16S rRNA from Butyricimonas
agagtttgatcatggctcaggatgaacgctagcggcaggcttaacacatgcaagtcgaggggcagcgggtctagcaatagatgccggcgaccggcgaaagggtgagtaacgcgtgagcaacatacccttgacagggggataggcactggaaacggtgtgtaataccccgtaatacattccatcgcatggtggggtgttgaaagattcattggtcaaggattggct

SEQ ID NO: 546 - DNA, 225 bp, Unknown
  Encodes 16S rRNA from Lachnospiracea incertae sedis
agagtttgatcatggctcaggatgaacgctggcggcgtgcttaacacatgcaagtcgaacgaagctcctgcgcagatcccttcggggtgaagcaagggaagacttagtggcggacgggtgagtaacgcgtgggtaacctgccatatacagggggataacagttagaaatgactgctaataccccataagcgcacagtaaggcatcttacagtgtgaaaagccttt

SEQ ID NO: 547 - DNA, 225 bp, Unknown
  Encodes 16S rRNA from Treponema
agagtttgatcatggctcagaacgaacgctggcggcgcgtcttaagcatgcaagtcggacgggatatggtagcttgctaccattgagagtggcggactggtgagtaacgcgtgggtgacgtaccctggtgaccgggacagctcctagaaataggaggtaataccggatacgctggatgctgtcagagggcattcaggaaagcagcttttgctgcgcacgaggagc

SEQ ID NO: 548 - DNA, 225 bp, Unknown
  Encodes 16S rRNA from Clostridium sensu stricto
agagtttgatcctggctcaggacgaacgctggcggcgcgcctaacacatgcaagtcgaacgggactagtgactagagtcaagaagttttcttggttctattcactagttcagtggcggacgggtgagtaaagcatgagtaacttgcccattagtggggaatagcttttggaaacagaagataataccgcatacatcggtttggacacatgttcggaccggaaaag

SEQ ID NO: 549 - DNA, 225 bp, Unknown
  Encodes 16S rRNA from Clostridium XlVa
agagtttgatcctggctcaggatgaacgctggcggcgtgcctaacacatgcaagtcgagcggagatagaacaccggatgaagattcgtcggaatccaccgttttatcttagcggcggatgggtgagtaacgcgtggataacctgcccttcacagggggataacaaccggaaacgggtgctaataccgcatgggcgcagggggccgcatggttcccggcgtaaaga

SEQ ID NO: 550 - DNA, 225 bp, Unknown
  Encodes 16S rRNA from Anaerovorax
agagtttgatcatggctcaggatgaacgctggcggcgtgcctaacacatgcaagtcgagcgagaaaggacgaagcagcttgctgcagagtcccggacagcggcggacgggtgagtaacgcgtaggtaagctgccccttgcaggaggatagcctcgggaaaccgggattaatacttcataacgcgtttttatcgcatggtgaaaacgccaaagatttatcggcaag

SEQ ID NO: 551 - DNA, 225 bp, Unknown
  Encodes 16S rRNA from Saccharofermentans
agagtttgatcctggctcaggacgaacgctggcggcgtgcctaacacatgcaagtcgagcggggacactggaggagcttgcttcactggtgttctagcggcggacgggtgagtaacgcgtgaacaatctgtcccggacagggggataacacttggaaacaggtgctaataccgcataagcccacggtaccgcatggtacagggggaaaaggagcgatccggttcg

SEQ ID NO: 552 - DNA, 225 bp, Unknown
  Encodes 16S rRNA from Clostridium XlVa
agagtttgatcatggctcaggatgaacgctggcggcgtgcctaacacatgcaagtcgaacgaagttgtttccacccgacagattatcttcggatatgaagtcaccggaaacgcttagtggcggacgggtgagtaacgcgtgggcaacctgccctacacagggggatagcggttggaaacgaccggtaataccgcatacctttattgaaccgcatgatttaataaa

SEQ ID NO: 553 - DNA, 225 bp, Unknown
  Encodes 16S rRNA from Clostridium III
agagtttgatcatggctcaggataaacgctggcggcgcacataagacatgcaagtcgaacggacgattattaattcttcacgatttaataaaagttagtggcggactggtgagtaacgcgtgagcaacctacctattagaggggaataacgaagagaaattttcgctaataccgcataagctgaaggaatcgcatgattcagtcagaaaaggagcaatccgctaa

SEQ ID NO: 554 - DNA, 225 bp, Unknown
  Encodes 16S rRNA from Clostridium IV
agagtttgatcatggctcaggatgaacgctggcggcgtgcataacacattcaagtcgaacgggcgagagggcttcggtcctcaagtcagtggcggacgggtgagtaacgcgtgagcaacctgcccctatgtgcgggataaccttcggaaacggatgctaataccgcatgaaccaacgggatcgcatggtccagttggcaaagatttattgcatagggatgggctc

SEQ ID NO: 555 - DNA, 225 bp, Unknown
  Encodes 16S rRNA from Ruminococcus
agagtttgatcatggctcaggacgaacgctggcggtatgcttaatacatgcaagtcgaacggagctcagcggaagcttgcttctgcgaaagcttagtggcggacgggtgagtaacgcgtgagtaacctgccttaaagagggggataacacagagaaatctgtgctaataccgcataatgcagcacagccgcatgactatgctgccaaaggtcagccgctttaaga

SEQ ID NO: 556 - DNA, 225 bp, Unknown
  Encodes 16S rRNA from Clostridium XlVa
agagtttgatcctggctcaggatgaacgctggcggcgtgcctaacacatgcaagtcgaacggaaaggattcttcggaattctttcagtggcggacgggtgagtaacgcgtgggtaacctgccccatacaggggaacaacagctggaaacggctgctaataccgcataagcgcacagtactgcatggtacagtgtgaaaagattttatcggtatgggatggacccg

SEQ ID NO: 557 - DNA, 225 bp, Unknown
  Encodes 16S rRNA from Clostridium XI
agagtttgatcatggctcaggacgaacgctggcggcgtgcttaacacatgcaagtcgaacgaggtttactgaagagcttgctctgaggtagaccgagtggcggacgggtgagtaacgcgtgaggaacctgtcttacacagggggataacgcaccgaaaggtgtgctaataccgcataagaccacactttcgcatggaagaggggtcaaaggagcgatccggtgta

SEQ ID NO: 558 - DNA, 225 bp, Unknown
  Encodes 16S rRNA from Clostridium XlVa
agagtttgatcatggctcaggatgaacgctggcggcgtgcctaacacatgcaagtcgagcggagttacataagcttgcttttgtaacttagcggcggatgggtgaggaacgcgtggataacctgcctcgcactgggggataacagctggaaacggctgttaataccgcatatgctcacggtaccgcatggtacagggaggaaagatttatcggtgcgagatggat

SEQ ID NO: 559 - DNA, 225 bp, Unknown
  Encodes 16S rRNA from Eubacterium
agagtttgatcatggctcaggattaacgctggcggcgtgcctaacacatgcaagtcgagcgagaaatggtgaagagaaacttcggttgaacagatccatggacagcggcggacgggtgagtaacgcgtgggcaacctgcccctttccggaggatagccaagggaaactttgaataatactccataaagcaagagtaccgcatgatacacttgccaaagatttatc

SEQ ID NO: 560 - DNA, 225 bp, Unknown
  Encodes 16S rRNA from Lachnospiracea incertae sedis
agagtttgatcatggctcaggatgaacgctggcggcgcgcttaacacatgcaagtcgaacggaatttatagcttcggttgtgaattcagtggcggacgggtgagtaacacgtggataacttgccttttagtgggggatagctgagagaaatctcaattaataccgcataaagtaatttattcgcatgaatagattaataaagatgaaaatcgctaaaagataggt

SEQ ID NO: 561 - DNA, 225 bp, Unknown
  Encodes 16S rRNA from Clostridium IV
agagtttgatcatggctcaggatgaacgctggcggcgtgcataacacattcaagtcgaacgaagcattaagacggaagccttcgggtggaagatttaatgacttagtggcggacgggtgagtaacgcgtgagcaaccttcctgcctgtgagggataacacagggaaacttgtgctaataccgcataaagcatttgagtcgcatggtttaggtgccaaagatttat

SEQ ID NO: 562 - DNA, 225 bp, Unknown
  Encodes 16S rRNA from Ruminococcus
agagtttgatcatggctcaggacgaacgctggcggcacgcttaacacatgcaagtcgaacggtgacggcaacaagcttgcttgttgcaagatcagtggcggacgggtgagtaacacgtgagcaatctgccttcgggtgggggataccagttggaaacgactgttaataccgcataacatgatagaaccgcatgattttatcatcaaagatttattgcctgaagat

SEQ ID NO: 563 - DNA, 225 bp, Unknown
  Encodes 16S rRNA from Clostridium IV
agagtttgatcctggctcaggacgaacgctggcggcgtgcctaacacatgcaagtcgaacggagttattcgagatgaagttttcggatggaattttggataacttagtggcggacgggtgagtaacgcgtgagtaacctgcccataagagggggataacgttctgaaaagaacgctaataccgcataatatatttggttcgcatgaaccgaatatcaaaggagca

SEQ ID NO: 564 - DNA, 225 bp, Unknown
  Encodes 16S rRNA from Faecalibacterium
agagtttgatcatggctcaggataaacgctggcggcgcacataagacatgcaagtcgaacggacccaaatcattcattacgattgatggaaggttagtggcggactggtgagtaacgcgtgagcaacctacctataagaggggaataacagagagaaatttctgctaataccgcataagctgaaagaatcgcatgatttagtcagaaaaggagcaatccgcttat

SEQ ID NO: 565 - DNA, 225 bp, Unknown
  Encodes 16S rRNA from Anaerovibrio
agagtttgatcatggctcaggacgaacgctggcggcgtgcttaacacatgcaagtcgaacggagtgaaggggagcttgctccttggaacttagtggcaaacgggtgagtaacgcgtaggcaacctgcccttcagatggggacaacatttcgaaaggaatgctaataccgaatgacgtgcattggtcgcatgaccgatgtaccaaaggccgggcaaccggtcactg

SEQ ID NO: 566 - DNA, 225 bp, Unknown
  Encodes 16S rRNA from Asaccharobacter
agagtttgatcctggctcaggatgaacgctggcggcgtgcctaacacatgcaagtcgaacggttaagccggcttcggccgggtatagagtggcgaacgggtgagtaacacgtgaccaacctgccccgcgccccgggatagcctcgtgaaaacgggattaacaccggatgcgccgcgggccccgcatggggcccgcgggaaagcttggcggcgcgggatggggtcg

SEQ ID NO: 567 - DNA, 225 bp, Unknown
  Encodes 16S rRNA from Pelotomaculum
agagtttgatcctggctcaggacaaacgctggcggcgtgcttaacacatgcaagtcgtacggagctgcaggacggaatccttcgggaggaagaacggcagcttagtggcggacgggtgagtaacgcgtgagcaacctgcccataagagggggataacagttggaaacgactgctaataccgcataagaccacaacaccgcatggtggaggggtcaaagagcaatc

SEQ ID NO: 568 - DNA, 225 bp, Unknown
  Encodes 16S rRNA from Spirochaeta
agagtttgatcatggctcagaacgaacgctggcggcgcgtcttaagcatgcaagtcgagcgggaaggtgtagcttgctacgccggagagcggcggactggtgagtaacacgtgggtaacgcacccttctgacggggacagcctgtggaaacacagggtaataccggatgagatgtgcttctggaagggggcacatgaaaggagctacggctccgcagggggaacg

SEQ ID NO: 569 - DNA, 225 bp, Unknown
  Encodes 16S rRNA from Prevotella
agagtttgatcatggctcaggatgaacgctagctacaggcttaacacatgcaagtcgaggggcagcatgtcgtgtgcttgcacacgatgatggcgaccggcgcacgggtgagtaacgcgtatccaacctgcccatgactccgggatagcccgctgaaaagcggattaacaccggatgtggtcgaaagaggacatctgatttcgaccaaagcttcggcggtcatgg

SEQ ID NO: 570 - DNA, 225 bp, Unknown
  Encodes 16S rRNA from Lachnospiracea incertae sedis
agagtttgatcatggctcaggatgaacgctggcggcgtgcttaacacatgcaagtcgaacgaagcacctctcccgaagattgaagtagcttgctacggattgattcatttgaggtgacttagtggcggacgggtgagtaacgcgtgggtaacctgcctcatagagggggacaacagttggaaacgactgctaataccgcataacatgtgactgtcacatgacaga

SEQ ID NO: 571 - DNA, 225 bp, Unknown
  Encodes 16S rRNA from Anaerovorax
agagtttgatcatggctcaggatgaacgctggcggcgtgcttaacacatgcaagtcgagcgagaaacctacagatgacgcttcggttgattcagtaggcggaaagcggcggacgggtgagtaacgcgtaggcaacctgcccctggcagagggatagcatcgggaaactgatattaagacctcataacgcatcgatatcacatgataatgatgccaaagatttatc

SEQ ID NO: 572 - DNA, 225 bp, Unknown
  Encodes 16S rRNA from Clostridium IV
agagtttgatcatggctcaggattaacgctggcggcgtgcataacacattcaagtcgaacggacgaagcccttcggggcctagttagtggcggacgggtgagtaacgcgtgagcaacctgcccttatgtgggggataacgaccggaaacggtcgctaataccgcatgacccgatagtatcgcatgatacagtcggcaaagatttattgcataaggatgggctcgc

SEQ ID NO: 573 - DNA, 225 bp, Unknown
  Encodes 16S rRNA from Victivallis
agagtttgatcctggctcagaacgaacgctggcggcatggattaggcatgcaagtcgaacgaggtagcaataccgagtggcggaagggtgaggaacgcgtgagtaatctgccccctagttgggaataacagttggaaacgactgctaataccgaatgtggctttcaggtcgcatgacttgaaggctaaagatttatcgctaggggatgagctcgcgtcccattag

SEQ ID NO: 574 - DNA, 184 bp, Unknown
  Encodes 16S rRNA from Syntrophococcus
agagtttgatcatggctcaggatgaacgctggcggcgtgctttgcacaatgggggaaaccctgatgcagcgacgccgcgtgagtgatgaagtatttcggtatgtaaagctctatcagcagggaagaagatgacggtacctgagtaagaagccccggctaactacgtgccagcagccgcggtaat

SEQ ID NO: 575 - DNA, 225 bp, Unknown
  Encodes 16S rRNA from Syntrophococcus
agagtttgatcctggctcaggatgaacgctagctacaggcttaacacatgcaagtcgagcgaagcgcagaaacggatttcttcggattgaaggttctgtgactgagcggcggacgggtgagtaacgcgtggggaacctgccctgtaccgggggataacagacagaaatgtctgctaataccgcataagcgcacgagaaggcatcttcttgtgtgaaaaactccgg

SEQ ID NO: 576 - DNA, 225 bp, Unknown
  Encodes 16S rRNA from Desulfovibrio
agagtttgatcatggctcagattgaacgctggcggcgtgcttaacacatgcaagtcgaacgcgaaaggggcttcggtcccgagtagagtggcgcacgggtgagtaacgcgtggatgatctgcccctgcagctggaatagcgactggaaacggtcgataataccggatacgcccttgttgaacgatgaggggaaaggagacctctgcttgcaagtttccgtgcagg

SEQ ID NO: 577 - DNA, 225 bp, Unknown
  Encodes 16S rRNA from Lachnospiracea incertae sedis
agagtttgatcatggctcaggatgaacgctggcggcgtgcttaacacatgcaagtcgaacgaagctcttacgacggatctcttcggagtgaagatgtttgagacttagtggcggacgggtgagtaacgcgtgggtaacctgccccatagagggggacaacagttggaaacgactgctaataccgcatagtaagagaaattcgcatgtttttctcttgaaagcttt

SEQ ID NO: 578 - DNA, 225 bp, Unknown
  Encodes 16S rRNA from Lachnospiracea incertae sedis
agagtttgatcctggctcaggatgaacgctggcggcgtgcttaacacatgcaagtcgaacggagtgtcatttcttcggataggacacttagtggcggacgggtgagtaacgcgtgggtaacctgcctcacacagggggatagcagttggaaacgactgataataccgcataagcgcacagtatcgcatggtacagtgtgaaaaactccggtggtgtgagatggac

SEQ ID NO: 579 - DNA, 225 bp, Unknown
  Encodes 16S rRNA from Clostridium IV
agagtttgatcatggctcaggacgaacgctggcggcgcgcctaacacatgcaagtcgaacggagagtggtttttgattccttcgggatgattattccatttcttagtggcggacgggtgagtaacacgtgagcaacctgccttgcagtgggggataacggttggaaacgatcgctaatacctcataatatatgattgtcgcatggctttcatatcaaagtttttt

SEQ ID NO: 580 - DNA, 204 bp, Unknown
  Encodes 16S rRNA from Prevotella
agagtttgatcctggctcaggatgaacgctagctacaggctttggtcaatgggcgagagcctgaaccagccaagtagcgtgcaggatgacggccctatgggttgtaaactgcttttatacggggataaagtgagggacgtgtccctttttgtaggtaccgtatgaataaggaccggctaattccgtgccagcagccgcggtaat

SEQ ID NO: 581 - DNA, 225 bp, Unknown
  Encodes 16S rRNA from Victivallis
agagtttgatcctggctcagaatgaacgctggcggcatggattaggcatgcaagtcgaacgagaaagcggcttcggccgcgagtaaagtggcgaaagggtgagtaacacgtgaggaacctgccccctggcccggaacaagcctgtgaaaacgggtctgaaaccggatgaggccccctcccgcatgggggggaagccaaatattcatagccaagggatggcctcgc

SEQ ID NO: 582 - DNA, 225 bp, Unknown
  Encodes 16S rRNA from Clostridium XlVa
agagtttgatcctggctcaggatgaacgctggcggcgtgcttaacacatgcaagtcgaacgaagcatagcttgtgaatttcttcggattgaagcagttatgactgagtggcggacgggtgagtaacgcgtgggtaacctgccttacacagggggacaacagagggaaacctctgctaataccgcataacccgctagggccgcatggcccggacggaaaagattta

SEQ ID NO: 583 - DNA, 225 bp, Unknown
  Encodes 16S rRNA from Selenomonas
agagtttgatcatggctcaggacgaacgctggcggcgtgcttaacacatgcaagtcgaacggggcgattgaaagcttgcttttgagagcctagtggcaaacgggtgagtaacgcgtaggcaacctgcctttgggatggggacaacaggacgaaagccctgctaataccgaatgaagtattcttcctgcatgggaaggatatgaaagatggcctctgaaaatgcta

SEQ ID NO: 584 - DNA, 225 bp, Unknown
  Encodes 16S rRNA from Bacteroides
agagtttgatcatggctcaggatgaacgctagcgacaggcctaacacatgcaagtcgaggggcagcgagttggtagcaataccgatgtcggcgaccggcgcacgggtgcgtaacaggtgtgcaatctgtccatagtcggaggatagcccggtgaaaaccgaattaatactccatgtgtcattaaatcgcatgttttgatgatgaaacgtaaggactatggttgag

SEQ ID NO: 585 - DNA, 225 bp, Unknown
  Encodes 16S rRNA from Clostridium XlVa
agagtttgatcatggctcaggatgaacgctggcggcgtgcctaacacatgcaagtcgaacgggacttttaccgacggagattcgtcaaagttggtttaagtctagtggcggacgggtgagtaacgcgtggagaacctgccctttaccgggggataacagagggaagcttctgctaataccgcataagcgcacagtaccgcatggtacagtgtgaaaaactccggt

SEQ ID NO: 586 - DNA, 225 bp, Unknown
  Encodes 16S rRNA from Eggerthella
agagtttgatcctggctcaggatgaacgctggcggcgtgcttaacacatgcaagtcgaacgattaacccatcttcggatggttataaagtggcgaacgggtgagtaacacgtgaccaacctacctttcacattgggataactaagggaaactgtagctaataccaaatactccgggtatccggcatcggaaacccgggaaagctccggcggtgaaagatggggtc

SEQ ID NO: 587 - DNA, 150 bp, Unknown
  Encodes 16S rRNA from Selenomonas
agagtttgatcatggctcaggatgaacgctagctacaggcttaacacatgcaagtcgaggggacgaatgtacgggatgaaaatattgttctgtaatgacggtacctgacgaggaagccacggctaactacgtgccagcagccgcggtaat

SEQ ID NO: 588 - DNA, 225 bp, Unknown
  Encodes 16S rRNA from Mogibacterium
agagtttgatcctggctcaggatgaacgctggcggcgtgcctaatacatgcaagtcgagcgagaagcttctttgaagattcttcggatgattctgtgaagtggaaagcggcggacgggtgagtaacgcgtaggcaacctgcccctgacagagggatagccattggaaacgatgattaaaacctcataatgccgaaagagcacatgcacttacggccaaagattta

SEQ ID NO: 589 - DNA, 225 bp, Unknown
  Encodes 16S rRNA from unknown taxa
agagtttgatcctggctcaggacgaacgcttgcgacgtgcctaagaaatgcaagtcgagcgatgacgggggcttcggctccttgattagcggcgaacggtcgcgtaacacgtaagcaatctgccccaaagtttgggatagccatccgaaaggatgattaataccggatgtggaacataaatcgcatgttttatgttctaaagcagcgatgcgctttgggatgagc

SEQ ID NO: 590 - DNA, 225 bp, Unknown
  Encodes 16S rRNA from Clostridium XlVa
agagtttgatcatggctcaggatgaacgctggcggcgtgcctaacacatgcaagtcgaacggaccttttacagactgcgattcgtcaaaggacgtttaaggttagtggcggacgggtgagtaacgcgtgggtaacctgcctcatagagggggataacagtttgaaaagactgctaataccgcataagcccacaggaccgcatggtccagggggaaaagattcatc

SEQ ID NO: 591 - DNA, 225 bp, Unknown
  Encodes 16S rRNA from Victivallis
agagtttgatcctggctcagaacgaacgctggcggcatggattaggcatgcaagtcgaacgaagtagcaatacttagtggcgcaagggtgaggaacgcgtgagtgacctacccgcaagtttggaacagctcctggaaacgggaattaataccggatgtgatcaatgagctgcatggtttattgattaaagcagtaatgcgcttgcggatgggctcgcgtcccatt

SEQ ID NO: 592 - DNA, 225 bp, Unknown
  Encodes 16S rRNA from Paraprevotella
agagtttgatcatggctcaggatgaacgctagctacaggcttaacacatgcaagtcgaggggcatcacgtggcagcaatgtcatggtggcgaccggcgcacgggtgagtaacgcgtatccgacctggccttcactccgggacagccctccgaaagggggattaatccgggatgtgtggagaagtcgcatggaatctccatgaaagattcatcggtgaaggatggg

SEQ ID NO: 593 - DNA, 225 bp, Unknown
  Encodes 16S rRNA from Brevundimonas
agagtttgatcatggctcaggacgaacgctggcggtgtgcctcatacatgcaagtcgaacgataaggcttcttcggaagtacataagtggcggacgggtgagtacaacataggaaatctgccttaagctgggggacaacagagggaaactcctgctaataccccatatgagctaacttgaaatagttatcttgaaagctccggcggcttaagatgagcctgtgcc

SEQ ID NO: 594 - DNA, 225 bp, Unknown
  Encodes 16S rRNA from Prevotella
agagtttgatcatggctcaggatgaacgctagctacaggcttaacacatgcaagtcgaggggcagcgctggggttgcttgcaacccctggcggcgaccggcgcacgggtgagtaacgcgtatccaacctgcccccaaccgccgcacagcccgccgaaaggcggattaattcggcatgaggtccggcgacggcatcatatccggacgaaaggtattttaccggttg

SEQ ID NO: 595 - DNA, 225 bp, Unknown
  Encodes 16S rRNA from Prevotella
agagtttgatcatggctcaggatgaacgctagctacaggcttaacacatgcaagtcgaggggtaacgtgagagaagcttgcttctcttgacgacgaccggcgaatgggtgagtaacgcgtatccaacctgccgcacgcccgggaacagcccttggaaacgaggattaaatcccgataccttattattccgcatggagaaataagaaaacaggcatgcgatgggga

SEQ ID NO: 596 - DNA, 210 bp, Unknown
  Encodes 16S rRNA from Robinsoniella
agagtttgatcatggctcaggacgaacgctggcggcgtgcttaacacatgcaagtcgaacggggatattgcacaatgggcggaagcctgatgcagcgacgccgcgtgaaggaagaagtatttcggtatgtaaacttctatcagcggggaagaagatgacggtacccgactaagaagccccggctaactacgtgccagcagccgcggtaat

SEQ ID NO: 597 - DNA, 225 bp, Unknown
  Encodes 16S rRNA from Clostridium III
agagtttgatcatggctcaggacgaacgctggcggcgtgcctaacacatgcaagtcgaacgggattccatcgaatgaggcttcggcggattttggtggacatctagtggcggacgggtgagtaacgcgtgagcaacctgcctttaagagggggataacataccgaaaggtatgctaataccgcataagatattagtaccgcatgatacagatatcaaagatttca

SEQ ID NO: 598 - DNA, 225 bp, Unknown
  Encodes 16S rRNA from Butyricimonas
agagtttgatcatggctcaggatgaacgctagcggcaggcttaacacatgcaagtcgaggggcagcgggtctagcaatagatgccggcgaccggcgaaagggtgagtaacgcgtgagcaacatacccttgacagggggataggcactggaaacggtgtgtaataccccgtaacacattccgccgcatgacgggatgttgaaagattgattggtcaaggattggct

SEQ ID NO: 599 - DNA, 225 bp, Unknown
  Encodes 16S rRNA from Spirochaeta
agagtttgatcctggctcagaacgaacgctggcggcgcgtcttaagcatgcaagtcgagcggtaaggaggtagcttgctacttccctagagcggcggactggtgagtaacgcgtgggtgacgtaccctttggttggggatagccggtagaaataccgggtaataccgaataagacctctagtagaaagattagagaggaaagcggctccggccgcgccgaaggaa

SEQ ID NO: 600 - DNA, 225 bp, Unknown
  Encodes 16S rRNA from Hydrogenoanaerobacterium
agagtttgatcatggctcaggatgaacgctggcggcgtgcctaacacatgcaagtcgaacggaactttttacgagcaaggcttcggccaagcaagtttcaagtttagtggcggacgggtgagtaacgcgtgagcaacctgcctttcagagggggataacgtttggaaacgaacgctaataccgcataacgtatggaaatcgcatggtaaccataccaaagatttt

SEQ ID NO: 601 - DNA, 225 bp, Unknown
  Encodes 16S rRNA from Proteiniclasticum
agagtttgatcatggctcaggacgaacgctggcggcgtgcctaacacatgcaagtcgagcggggacaaaactggaagggtttcggcctggaaggaaatgttccagcggcggacgggtgagtaacgcgtgaacaatctgtcccagacagggggataacagatggaaacatctgctaataccgcataagaccacgaggcgacatcgccttgaggtaaaaggaggaat

SEQ ID NO: 602 - DNA, 225 bp, Unknown
  Encodes 16S rRNA from Roseburia
agagtttgatcatggctcaggatgaacgctggcggcgtgcttaacacatgcaagtcgaacgaattttttacagaaggaagcttcggccgacggacgtaagaagtgagtggcggacgggtgagtaacgcgtgggtaacctgcctcacatcgggggataccagtcggaaacgactgctaaaaccgcataagaccacggtatcgcatgatactgaggccaaaactccg

SEQ ID NO: 603 - DNA, 225 bp, Unknown
  Encodes 16S rRNA from Clostridium XlVa
agagtttgatcctggctcaggatgaacgctggcggcgtgcctaacacatgcaagtcgaacgaagaccccgaagcggagatttcggttgaagctaagggaggactgagtggcggacgggtgagtaacgcgtggataacctgccccatacagggggatagcagttggaaacgactgataataccgcataagcgcacggagagacatctctttgtgtgaaaagattta

SEQ ID NO: 604 - DNA, 225 bp, Unknown
  Encodes 16S rRNA from Anaerofustis
agagtttgatcatggctcaggacgaacgctggcggcgtgcttaacacatgcaagtcgaacgggaagctttgacaagttttactttgatgagtggacagtggcgaacgggtgagtaacgcgtaggtaaccaaccttatgctgggggatagcctttggaaacgaagagtaataccgcataagaccacactgccgcatggcagaggggtaaaagatttattggcatga

SEQ ID NO: 605 - DNA, 225 bp, Unknown
  Encodes 16S rRNA from Succiniclasticum
agagtttgatcatggctcaggacgaacgctggcggcgtgcctaacacatgcaagtcgaacggggattttgtttcggcagaatcctagtggcgatcggtagccggtctgagaggatgaacggccacattgggactgagacacggcccagactcctacgggaggcagcagtggggaatcttccgcaatgggcgcaagcctgacggagcaacgccgcgtgagtgagga

SEQ ID NO: 606 - DNA, 225 bp, Unknown
  Encodes 16S rRNA from Anaeroplasma
agagtttgatcctggctcaggattaacgctggcggcgtgcctaatacatgcaagtcgaatggtggtagcaatacaaaccatggcgaacgggtgagtaacacgtaggtaacctatcttactgacgaggataaccgttggaaacgacggataatactggataggacatcacaaagggcatccttagatgtttaaaggagcaatccacggtaagaggggcctgcggcg

SEQ ID NO: 607 - DNA, 225 bp, Unknown
  Encodes 16S rRNA from Oscillibacter
agagtttgatcatggctcaggacgaacgctggcggcgtgcctaacgatcagtagccggactgagaggttgaacggccacattgggactgagatacggcccagactcctacgggaggcagcagtggggaatattgggcaatgggggcaaccctgacccagcaacgccgcgtgaaggaagaaggctttcgggttgtaaacttcttttaccgaggacgaagaacgtga

SEQ ID NO: 608 - DNA, 225 bp, Unknown
  Encodes 16S rRNA from Escherichia/Shigella
agagtttgatcatggctcagattgaacgctggcggcaggcctaacacatgcaagtcgaacggtaacaggaagaagcttgcttctttgctgacgagtggcggacgggtgagtaatgtctgggaaactgcctgatggagggggataactactggaaacggtagctaataccgcataacgtcgcaagaccaaagagggggaccttcgggcctcttgccatcggatgtg

SEQ ID NO: 609 - DNA, 225 bp, Unknown
  Encodes 16S rRNA from Bacteroides
agagtttgatcctggctcaggatgaacgctagcgacaggcctaacacatgcaagtcgaggggcagcgagtttgtagcaatacagatgtcggcgaccggcgcacgggtgcgtaacaggtgtgcaacctggcctataccaagggatagcccgctgaaaggcggattaatactttataagttgtgatgaggcatctcattataatgaaacgttagggtataggatggg

SEQ ID NO: 610 - DNA, 225 bp, Unknown
  Encodes 16S rRNA from Clostridium XlVa
agagtttgatcctggctcaggatgaacgctggcggcgtgcctaacacatgcaagtcgagcggggacgcgccaaagaggatgattcgtctgattcttagcgcgtcttagcggcggatgggtgagtaacgcgtggacaacctgcccgcaacagggggataacagctggaaacggctgataataccgcatatgcacacggttccgcatgggactgggtggaaagattt

SEQ ID NO: 611 - DNA, 225 bp, Unknown
  Encodes 16S rRNA from Clostridium XlVa
agagtttgatcatggctcaggatgaacgctggcggcgtgcctaacacatgcaagtcgaacggtgaaagaagacggaagccttcgggcggaagttttttggatcagtggcggacgggtgagtaacgcgtggataacctgcctcatacagggggataacagggagaaatcactgctaataccgcataagcgcacaggaccgcatggtctggtgtgaaaaactccggt

SEQ ID NO: 612 - DNA, 225 bp, Unknown
  Encodes 16S rRNA from Clostridium IV
agagtttgatcatggctcaggatgaacgctggcggcgtgcataacacattcaagtcgaacgaagcactggcgaggaagtcttcggatggaattgcttttgacttagtggcggacgggtgagtaacgcgtgagcaaccttcctggcagtgagggataacacagggaaacttgtgctaataccgcatgacgcacgattgtcgcatggcagacgtgccaaagattaat

SEQ ID NO: 613 - DNA, 225 bp, Unknown
  Encodes 16S rRNA from Clostridium III
agagtttgatcatggctcaggacgaacgctggcggcgcgcttaacacatgcaagtcgaacggtgaaggtgcttcggcaccggatcagtggcggacgggtgagtaacacgtgagcaacctgcccttcagagggggataacattgagaaatcagtgctaataccgcataagaccacagtaaggcatcttacaggggtcaaaggagcaatccgctgaaggatgggctc

SEQ ID NO: 614 - DNA, 225 bp, Unknown
  Encodes 16S rRNA from Prevotella
agagtttgatcctggctcaggatgaacgctagctacaggcttaacacatgcaagtcgaggggcagcatgtcgtgtgcttgcacacgatgatggcgaccggcgcacgggtgagtaacgcgtatccaacctgcccatgaccccgggatagcccgctgaaaagcggattaacaccggatgcggtcgaaagaggacatctgatttcgaccaaagcttcggcggtcatgg

SEQ ID NO: 615 - DNA, 225 bp, Unknown
  Encodes 16S rRNA from Coprococcus
agagtttgatcatggctcaggatgaacgctggcggcgtgcttaacacatgcaagtcgaacgaagcacttaggacagatttcttcggattgacgacctaattgacttagtggcgaacgggtgagtaacgcgtgggtaacctgcctcatgcagggggataacaattagaaatgattgctaataccgcataagaccgcggtaccgcatggtacagcggccaaagattt

SEQ ID NO: 616 - DNA, 225 bp, Unknown
  Encodes 16S rRNA from Oscillibacter
agagtttgatcatggctcaggacgaacgctggcggcgtgcctaacacatgcaagtcgaacggaactctttggaacaaggcttcggccaagggaatttgagtttagtggcggacgggtgagtaacgcgtgagcaacctgcccttcggagggggacaacagttggaaacgactgctaataccgcatgacatacagagatcgcatggtcattgtatcaaagatttatc

SEQ ID NO: 617 - DNA, 225 bp, Unknown
  Encodes 16S rRNA from Parabacteroides
agagtttgatcctggctcaggatgaacgctagcgacaggcttaacacatgcaagtcgaggggcagcgtggcggcagcaatgccgccgacggcgaccggcgcactggtgagtaacacgtatgcaacctgccccccacagggggacaatccagagaaatttggtctaataccgcataagagcgtccccggcatcggggttgcttgaaagcaatttgcggtgggggat

SEQ ID NO: 618 - DNA, 225 bp, Unknown
  Encodes 16S rRNA from Bacteroides
agagtttgatcctggctcaggatgaacgctagctacaggcttaacacatgcaagtcgaggggcagcatgggggaggtttcggccacccccgatggcgaccggcggatgggtgagtaacgcgtatccaacctgcccctgtcccggggacagcccttagaaatgaggattaacccccgatggcgcggaggggccgcatggcttttccgccaaatgcgaaggacaggg

SEQ ID NO: 619 - DNA, 225 bp, Unknown
  Encodes 16S rRNA from Mogibacterium
agagtttgatcctggctcaggatgaacgctggcggcgtgcctaatacatgcaagtcgagcgagaaatctttcagacgattcttcggatgagtcaggaagatggaaagcggcggacgggtgagtaacgcgtaggcaacctgccctcagcagagggatagccattggaaacgatgattaaaacctcataatgctgcagtaacacatgttacagcagccaaagattta

SEQ ID NO: 620 - DNA, 225 bp, Unknown
  Encodes 16S rRNA from Solobacterium
agagtttgatcatggctcaggatgaacgctggcggcgtgcctaatacatgcaagtcgatcgcgtcatgtagcttcggttatatgatgagaggcgaacgggtgagtaatacataagcaacctgcccacggagaccgggataacccctggaaacggggactaagaccggataggcaaaatgaaggcatcttcattatgttaaaggagaaagacactggtggatgggc

SEQ ID NO: 621 - DNA, 225 bp, Unknown
  Encodes 16S rRNA from Bacteroides
agagtttgatcatggctcaggatgaacgctagctacaggcctaacacatgcaagtcgcggggcagcattgaggtagcaatacttcagatggcgaccggcgcacgggtgcgtaacgcgtatccaacctggcccttactcgggtatagccctgcgaaagtaggattaatccccgatgttgtcaagatggagccttttttcttgaccaaaggtttatgtcggtaaggg

SEQ ID NO: 622 - DNA, 225 bp, Unknown
  Encodes 16S rRNA from Clostridium III
agagtttgatcctggctcaggacgaacgctggcggcgtgcttaatccatgcaagtcgaacggggcgattccggaaagtcttcggaccggaagggagagcttagtggcgaacgggtgagtaacgcgtgaccaaccaaccttaagcagggggacaacagctggaaacggctgctaataccgcataagaccacagtggggcatcctacaggggtcaaaggagcaatcc

SEQ ID NO: 623 - DNA, 225 bp, Unknown
  Encodes 16S rRNA from Victivallis
agagtttgatcctggctcagaacgaacgctggcggcatggattaggcatgcaagtcgaacggtgcagcaatgcacagtggcgcaagggtgaggaacgcgtgagtaatctgccctcaagttgggaacagcttctggaaacggaaattaataccgaatgtgatctttgggaggcatctttcaaagattaaaggccgcaaggtcgcttgaggaggggctcgcgtccca

SEQ ID NO: 624 - DNA, 225 bp, Unknown
  Encodes 16S rRNA from Saccharofermentans
agagtttgatcatggctcaggacgaacgctggcggcgtgcctaacacatgcaagtcgagcggaggatgtgaagaagcttgcttcattgcattctcagcggcggacgggtgagtaacgcgtgagcaacctggccttcacagggggataagacggcgaaagcggttctaataccccatatgaccacactgtcacatggcagaggggtgaaaggagcaatccggtgaa

SEQ ID NO: 625 - DNA, 225 bp, Unknown
  Encodes 16S rRNA from Saccharofermentans
agagtttgatcatggctcaggacgaacgctggcggcgtgcctaacacatgcaagtcgagcggacggaggggcttcggccccgaagtcagcggcggacgggtgagtaacgcgtgagcaatctgtcccggacagggggataacacttggaaacaggtgctaataccgcataagaccacgagggggcatccttttgaggtaaaaggaggaatccggtccggggtgagt

SEQ ID NO: 626 - DNA, 225 bp, Unknown
  Encodes 16S rRNA from Olivibacter
agagtttgatcatggctcaggatgaacgctagcggcaggcctaatacatgcaagtcgtacggtaaacggtccttcgggaccgtgagagtggcggacgggtgcgtaacgcgtatgcaaccaacccccctcgccgggatagccggtggaaacgccggataataccggatgcgccgcgtgggaggcatctcccgagcggcaaggcggagacgcggagggggacgggca

SEQ ID NO: 627 - DNA, 225 bp, Unknown
  Encodes 16S rRNA from Thermotalea
agagtttgatcatggctcaggatgaacgctggcggcgtgcctaacacatgcaagtcgagcgggaatctcctgattgaaacttcggtagattgacggggaggatagcggcggacgggtgagtaacgcgtaggtaagctgccctatgcacagggatagcctagggaaacctggattaatacctgatgacgctgcgaggtcacatggccatgcagccaaagttttttc

SEQ ID NO: 628 - DNA, 225 bp, Unknown
  Encodes 16S rRNA from Proteiniclasticum
agagtttgatcatggctcaggacgaacgctggcggtatgcctaacacatgcaagtcgaacgaaaaaagagagcttgctttcttttttagtggcgcacgggtgagtaacgcgtgagtaatctgccttaaagtgggggacaacatttggaaacgaatgctaataccgcgtaatatgcagttttcgcatgaattttgtattatagatttatcgctttaagatgagctc

SEQ ID NO: 629 - DNA, 225 bp, Unknown
  Encodes 16S rRNA from Clostridium III
agagtttgatcatggctcaggacgaacgctggcggcgtgcctaacacatgcaagtcgaacgagaaatgatgattagattccttcgggatgaaaagattcatggacagtggcggacgggcgagtaacgcgtgagtaacctgcccataagagagggatagccgatggaaacgtcgagtaatacctcatattgtaattaattcgcatggattgattatgaaagattta

SEQ ID NO: 630 - DNA, 225 bp, Unknown
  Encodes 16S rRNA from Anaeroplasma
agagtttgatcctggctcaggattaacgctggcggcatgcctaatacatgcaagtcgaatgagaagcttgcttctcatggcgaacgggtgagtaacacgtaggtaacctgccttacactcgaggataaccgttggaaacgacggataatactggataggacagagattcgcatgagactctgtttaaaagcgatggtgtatgaggggcctgcggtgcattagcta

SEQ ID NO: 631 - DNA, 225 bp, Unknown
  Encodes 16S rRNA from Treponema
agagtttgatcatggctcagaacgaacgctggcggcgcgtcttaagcatgcaagtcgagcggcaaggaaggagcttgcttcttccctagagcggcggactggtgagtaacgcgtgggtgacgtaccctccggacggggacagcctgtggaaacacaggataataccggatacggtgcatgttgtcagaggacatgcaggaaaggttcttttgaaccgccggagga

SEQ ID NO: 632 - DNA, 225 bp, Unknown
  Encodes 16S rRNA from Clostridium XlVa
agagtttgatcatggctcaggatgaacgctggcggcgtgcttaatacatgcaagtcgaacggggatgtccacccgatgaggccggagtgcttgcacaaaggccgattcaaccggatatcctagtggcggacgggtgagtaacgcgtgggtaacctgccttatacaggggaataacagtcagaaatggctgctaataccgcataagcgcacgaggccgcatggcca

SEQ ID NO: 633 - DNA, 225 bp, Unknown
  Encodes 16S rRNA from Clostridium III
agagtttgatcatggctcaggacgaacgctggcggcgcgcctaacacatgcaagtcgaacgggactagtgaccggagtgcagagaggatctgtattgcgatcactagttcagtggcggacgggtgagtaaagcatgagcaacctggctactagagggggatagcttttggaaacagaagataataccgcatacatcaaagatttcgcatgagatttttggaaaag

SEQ ID NO: 634 - DNA, 225 bp, Unknown
  Encodes 16S rRNA from Desulfotomaculum
agagtttgatcatggctcaggacgaacgctggcggcgtgcttaatacatgcaagtcgaacggagattatgatttcggttgtaatcttagtggcgaacgggtgagtaacgcgtgaacaacctgactcagagtgggggataacaacgggaaactgttgctaataccgcataagaccacatttccgcatgggagaggggtcaaagatttatcgctttgagaggggttc

SEQ ID NO: 635 - DNA, 225 bp, Unknown
  Encodes 16S rRNA from Bacillus
agagtttgatcctggctcaggatgaacgctggcggcgtgcctaatacatgcaagtcgatcgggagtagcaatacttcagaggcgtacgggtgagtaacacatagggaacctgcccttaagactgggatacccagacgaaagtttggctaataccggataacaacagaggtcgcatgacctttgcttgaaaggcgctctcaagcgccacttttggatggccctgtg

SEQ ID NO: 636 - DNA, 225 bp, Unknown
  Encodes 16S rRNA from Anaerovorax
agagtttgatcatggctcaggatgaacgctggcggcgtgcctaacacatgcaagtcgagcgggaaatcgctgattgagatttcggttgattgaagcgatggatagcggcggacgggtgagtaacgcgtaggtaatctgccttcagcacagggatagcctagggaaacctggattaatacctgataatgcagtttggtcacatggccagattgccaaagatttatc

SEQ ID NO: 637 - DNA, 191 bp, Unknown
  Encodes 16S rRNA from Ruminococcus
agagtttgatcatggctcaggatgaacgctagctacaggcttaacacatgcaagtcgaggggaaaccctgatgcagcgatgccgcgtggaggaagaaggttttcggattgtaaactcctgtcttaaaggacgataatgacggtactttaggaggaagctccggctaactacgtgccagcagccgcggtaat

SEQ ID NO: 638 - DNA, 225 bp, Unknown
  Encodes 16S rRNA from Agarivorans
agagtttgatcatggctcagattgaacgctggcggcaggcttaacacatgcaagtcgtacggtaacagagggggaatattgcacaatgggggaaaccctgatgcagccatgccgcgtgtgtgaagaaggccttcgggttgtaaagcacttttgcattcgaggaagacagcacgtaaataaacgtgttatttgacgttagagtgtgaataagcaccggcaaactcc

SEQ ID NO: 639 - DNA, 225 bp, Unknown
  Encodes 16S rRNA from Anaerotruncus
agagtttgatcatggctcaggacgaacgctggcggcgcgcttaacacatgcaagtcgaacggagcttgcttttgaaggtccttcgggaacggatgttgcaagcttagtggcggacgggtgagtaacgcgtgagcaacctgcctttcagagggggataacacaacgaaagctgtgctaataccgcatgacattgcgacaccgcatggtgatgcaatcaaaggagca

SEQ ID NO: 640 - DNA, 225 bp, Unknown
  Encodes 16S rRNA from Papillibacter
agagtttgatcatggctcaggatgaacgctggcggcgtgcataacacattcaagtcgaacggacgacagggggcttgctccctgaagtcagtggcggacgggtgagtaacgcgtgagcaacctgccttggtctgcgggataacattgggaaaccggtgctaataccgcataacgcatcgagatcacatggtcatgatgccaaagaagcaatttggaacaagatgg

SEQ ID NO: 641 - DNA, 185 bp, Unknown
  Encodes 16S rRNA from Clostridium XlVa
agagtttgatcctggctcaggatgaacgctggcggcgtgcttatgcacaatgggggaaaccctgatgcagcgacgccgcgtgagcgatgaagtatttcggtatgtaaagctctatcagcagggaagaaaatgacggtacctgactaagaagcaccggctaaatacgtgccagcagccgcggtaat

SEQ ID NO: 642 - DNA, 225 bp, Unknown
  Encodes 16S rRNA from Clostridium III
agagtttgatcatggctcaggacgaacgctggcggcgtgcctaacacatgcaagtcgagcgatgatcagaagatgaggccctcgggcggattcttctgagattagcggcggatgggtgagtaacgcgtgggcaatctgccctccacagggggataacacagggaaacttgtgctaataccgcataacatctttttaaggcatcttaggaagatcaaaggagcgat

SEQ ID NO: 643 - DNA, 225 bp, Unknown
  Encodes 16S rRNA from Bacteroides
agagtttgatcatggctcaggatgaacgctagcggcaggcttaacacatgcaagtcgaggggcagcggagaagtagcaatacttctgccggcgaccggcgcacgggtgagtaacgcgtatgcaacctttcccagacagggggatagcccagggaaacttggattaataccccgtaagccagaagagggcatcctcgtctggttaaagttccggcggtctggggtg

SEQ ID NO: 644 - DNA, 225 bp, Unknown
  Encodes 16S rRNA from Clostridium XlVa
agagtttgatcctggctcaggatgaacgctggcggcgtgcctaacacatgcaagtcgaacgagcacttcggtgcgagtggcggacgggtgagtaacgcgtgggtaacctgccttacacagggggacaacagttggaaacgactgctaataccgcataagcccacggtaccgcatggtactgtgagaaaagatttatcggtgtaagatggacccgcgtctgattag

SEQ ID NO: 645 - DNA, 225 bp, Unknown
  Encodes 16S rRNA from Ruminococcus
agagtttgatcatggctcaggacgaacgctggcggcacgcttaacacatgcaagtcgaacggagttgatgacttcggttattaacttagtggcggacgggtgagtaacacgtgagcaacctgccttacagagaggaataatgactggaaacggtcactaatacctcataaaatatttagatcgcatggtttggatatcaaagatttatcgctgtaagatgggctc

SEQ ID NO: 646 - DNA, 225 bp, Unknown
  Encodes 16S rRNA from Clostridium XlVa
agagtttgatcatggctcaggatgaacgctggcggcgtgcctaacacatgcaagtcgaacgaagccctacaagtggagatttcggttgaagcgaggaggtgactgagtggcggacgggtgagtaacgcgtggagaacctggcccatacagggggatagcggctggaaacggccggtaaaaccgcataagcgcacaagcagggcatcctgtggtgtgaaaatcgaa

SEQ ID NO: 647 - DNA, 225 bp, Unknown
  Encodes 16S rRNA from Oscillibacter
agagtttgatcatggctcaggacgaacgctggcggcgtgcctaacacatgcaagtcgaacgaagctccaacacttgagttttcggacaagagtggcggaagacttagtggcggactggtgagtaacgcgtgagcaacctgccttccggtgggggacaacagttggaaacgactgctaataccgcataacatatgtctaaggcatcttagatatatcaaagcttta

SEQ ID NO: 648 - DNA, 225 bp, Unknown
  Encodes 16S rRNA from Nitrobacter
agagtttgatcatggctcagagcgaacgctagcggaatgctttatacatgcaagtcgaacgaacgagtttatattgagtagcaatacgatttatgaatgagttagtggcaaacgggtgagtaatagttaggaacttgccgaatagtgggggacaacagatagaaatgtctgctaataccgcatattcccgagaggggaaagatttattgctatttgagaggccta

SEQ ID NO: 649 - DNA, 225 bp, Unknown
  Encodes 16S rRNA from Clostridium XlVa
agagtttgatcatggctcaggatgaacgctggcggcgtgcctaacacatgcaagtcgaacggggtacagacgctgtgagagaaagcagcttgctgtggacttaaacttgtttgtacttagtggcggacgggtgagtaacgcgtggaaaacctgcctcatacagggggataacaggaagaaattcctgctaataccgcataagcgcacggtatcgcatggtacagt

SEQ ID NO: 650 - DNA, 225 bp, Unknown
  Encodes 16S rRNA from Lachnospiracea incertae sedis
agagtttgatcctggctcaggatgaacgctggcggcgtgcttaacacatgcaagtcgaacgggacttttggagcttgctccggaagttcagtggcggacgggtgagtaacgcgtgggtaacctgccgcatgcagggggacaacagttggaaacgactgctaataccgcataagcgcacgggaccgcatggtccggtgtgaaaagatttatcggcatgcgatggac

SEQ ID NO: 651 - DNA, 225 bp, Unknown
  Encodes 16S rRNA from Limibacter
agagtttgatcatggctcaggatgaacgctagcggcaggcctaatacatgcaagtcgtacggtaagcgccccttcgggggtgtgagagtggcggacgggtgcgtaacgcgtatgcaaccaacccccctcgccgggatagccggtggaaacgccggataataccggatgcgccgcgtgggaggcatctcccgagcggcaaggcggagacgcggagggggacgggca

SEQ ID NO: 652 - DNA, 225 bp, Unknown
  Encodes 16S rRNA from Desulfovibrio
agagtttgatcctggctcagattgaacgctggcggcgtgcctaacacatgcaagtcgaacgcgaaaggggcttcggccccgagtagagtggcgcacgggtgagtaacgcgtggataatctgcccctgcggctggaatagcgactggaaacggtcgataatgccggatacgcccttgtttaacgatgaggggaaaggagacctctgcttgcaagtttccgtgcagg

SEQ ID NO: 653 - DNA, 225 bp, Unknown
  Encodes 16S rRNA from Coprococcus
agagtttgatcatggctcaggatgaacgctggcggcgtgcttaacacatgcaagtcgaacgaagcacttttctttgattcttcggatgaaaaagagatttgactgagtggcggacgggtgagtaacgcgtgggtaacctgccctgtacagggggataacagttagaaatgactgctaataccgcataagaccacagcatcgcatggtgcagtggtaaaaactccg

SEQ ID NO: 654 - DNA, 225 bp, Unknown
  Encodes 16S rRNA from Anaerovorax
agagtttgatcatggctcaggattaacgctggcggcgtgcctaacacatgcaagtcgagcgggaaatttgagagtgaggcttcggcggatctcttaaatggagagcggcggacgggtgagtaacgcgtaggtaacctgccctgcacagagggatagccactggaaacggtgattaatacctcataaaactgttttgccgcatgacagaacagccaaagatttatc

SEQ ID NO: 655 - DNA, 225 bp, Unknown
  Encodes 16S rRNA from Spirochaeta
agagtttgatcctggctcagaacgaacgctggcggcgcgtcttaagcatgcaagtcgaacggcaagctaccttcgggtagcctagagtggcggactggtgagtaacacgtgggtgacatgccttcaggactggaatagcctgcagaaatgcagggtaatgccggatacggtgcaggacgttaggggtcctgcaagaaaggagcatttgctccgccgggagattgg

SEQ ID NO: 656 - DNA, 225 bp, Unknown
  Encodes 16S rRNA from unknown taxa
agagtttgatcatggctcaggacgaacgctggcggcgtgcttcatacatgcaagtcgaacgagaagcaagagcttgctcttgtggaaagtggcggacgggtgagtaacacgtagggaatctgccttcaggcgggggacaacagttggaaacgactgctaataccccatatgagctaagttgaaatacttatcttgaaaactccggtgcctgtagatgagcctgcg

SEQ ID NO: 657 - DNA, 225 bp, Unknown
  Encodes 16S rRNA from Saccharofermentans
agagtttgatcatggctcaggacgaacgctggcggcgtgcctaacacatgcaagtcgagcggagatgaggagaagcttgcttcgagacatctcagcggcggacgggtgagtaacgcgtgagcaacctgtcctctgcagggggataagacagcgaaagttgttctaataccgcataagaccacaacgtcacatggcgaaggggtcaaaggaggaatccggcagagg

SEQ ID NO: 658 - DNA, 225 bp, Unknown
  Encodes 16S rRNA from Anaeroplasma
agagtttgatcatggctcaggattaacgctggcggcgtgcctaatacatgcaagtcggatggttagcttgctaaccatggcgaacgggtgagtaacacgtaggcaacctgtctaaaagacgaggataaccattggaaacgatggataatactggataggattatttagggcatcctagataatttaaagatttatcacttttagaggggcctgcggcgcattagc

SEQ ID NO: 659 - DNA, 225 bp, Unknown
  Encodes 16S rRNA from Clostridium III
agagtttgatcatggctcaggacgaacgctggcggcgtgcttaatccatgcaagtcgaacggggcgattccggaaagtcttcggactggaaggaagagcttagtggcgaacgggtgagtaacgcgtgaccaaccaaccttaagcagggggacaacagctggaaacggctgctaataccgcataagaccacggtggggcatctcacaggggtcaaaggagcaatcc

SEQ ID NO: 660 - DNA, 225 bp, Unknown
  Encodes 16S rRNA from Victivallis
agagtttgatcctggctcagaacgaacgctggcggcatggattaggcatgcaagtcgaacgaagcagcaatgcttagtggcgcaagggtgaggaacacgtgagtgacctacccgcaagtttggaacagctcctggaaacgggaattaataccggatgtgatcaacgggctgcatggtctgttgattaaagcagcaatgcgcttgcggatgggctcgcgtcccatt

SEQ ID NO: 661 - DNA, 225 bp, Unknown
  Encodes 16S rRNA from Enterorhabdus
agagtttgatcatggctcaggatgaacgctggcggcgtgcctaacacatgcaagtcgaacggttaaggcggcttcggccgcgaatagagtggcgaacgggtgagtaacacgtgaccaacctgccccgcgcaccgggacagcctcgtgaaaacgggattaataccggatactccggcggcgcgggatggggtcgcggcccattaggtagtaggcggggtgacggcc

SEQ ID NO: 662 - DNA, 225 bp, Unknown
  Encodes 16S rRNA from Clostridium IV
agagtttgatcatggctcaggatgaacgctggcggcgtgcttaacacattcaagtcgaacggattccaggggagcttgctccccgaagaattagtggcggacgggtgagtaacgcgtgagcaacctgccttttttcgggggataacacggggaaaccggtgctaataccgcataacgtgccgaagtcgcatggctttggtaccaaaggagtaatccgaggaaaga

SEQ ID NO: 663 - DNA, 225 bp, Unknown
  Encodes 16S rRNA from Erysipelothrix
agagtttgatcctggctcaggatgaacgctggcggcgtgcctaatacatgcaagtcgaacgaagtacttcggtacttagtggcgaacgggtgagtaacacataaacaatctaccctgaagactgggataacggttggaaacgaccgctaataccggataggtgatcttaaggcatcttgagatcattaaagttgggctacaacactgcaggatgagtttatgtcg

SEQ ID NO: 664 - DNA, 225 bp, Unknown
  Encodes 16S rRNA from Clostridium III
agagtttgatcatggctcaggacgaacgctggcggcgtgcctaacacatgcaagtcgaacggagtgtatctgtgaatgagagaagcttgcttcaggaattctttgatatcacttagtggcgcacgggtgagtaacgcgtgggcaatctgcctttcacagggggacaacagagggaaacttctgctaataccgcataacatcaatttaaggcatcttagaatgatc

SEQ ID NO: 665 - DNA, 225 bp, Unknown
  Encodes 16S rRNA from Clostridium sensu stricto
agagtttgatcatggctcaggacgaacgctggcggcatgcctaacacatgcaagtcgaacggaataggtttggttgtagcgatactttcggacctatttagtggcgaacgggtgagtaacacgtgagcaacctgccttctacacagggataacagccggaaacggctgctaataccggataagaccacaccgaggcatctcggaggggtcaaagcgatttagcgg

SEQ ID NO: 666 - DNA, 225 bp, Unknown
  Encodes 16S rRNA from Gelidibacter
agagtttgatcctggctcaggataaacgctagcggcaggcctaacacatgcaagtcgagcggcagcggggtgtagcaatacattgccggcgagcggcggacgggtgagtaacgcgtatgcaacctgcccaccacacggagatagccgaccgaaaggacgattaaactccgatggcacctcatcaaggcatcttcttgaggttaaatattcataggtggtggatgg

SEQ ID NO: 667 - DNA, 225 bp, Unknown
  Encodes 16S rRNA from Roseburia
agagtttgatcctggctcaggatgaacgctggcggcgtgcttaacacatgcaagtcgaacgaagctcttttgcggatttcttcggattgaagtagaagatgacttagtggcggacgggtgagtaacgcgtgggtaacctgcctctgacagggggacaacagttagaaatgactgctaacaccgcataagcgcacagtaaggcatcttacagtgtgaaaatattca

SEQ ID NO: 668 - DNA, 225 bp, Unknown
  Encodes 16S rRNA from Neisseria
agagtttgatcctggctcagattgaacgctggcggcatgctttacacatgcaagtcgaacggcagcgtggtagtgcttgcactactgacggcgagtggcgaacgggtgagtaatgcatcggaatgtaccgagtaatgggggataactaatcgaaagattagctaataccgcatacgacctgagggtgaaagcaggggatcttaggaccttgcgttattcgagcag

SEQ ID NO: 669 - DNA, 225 bp, Unknown
  Encodes 16S rRNA from Prevotella
agagtttgatcctggctcaggatgaacgctagctacaggcttaacacatgcaagtcgaggggcatcaggattctagcttgctaggattgctggcgaccggcgcacgggtgagtaacgcgtatccaacctgccgcatagtcgggcacagccctctgaaaggaggattaatgccggatgtggtcattgtgggacatcccattatgactgaagatttattgctatgcg

SEQ ID NO: 670 - DNA, 225 bp, Unknown
  Encodes 16S rRNA from unknown taxa
agagtttgatcatggctcaggacgaacgctggcggcgtgcttcatacatgcaagtcgaacgagaatctggtgcttgcaccagaggaaagtggcggacgggtgagtaaaatgtagagaatctgccctagagagggggatagcagttggaaacgactattaataccccatatgcgcgtagttgagatactattcgtgaaaactccggtgctctgggatgagtctgca

SEQ ID NO: 671 - DNA, 225 bp, Unknown
  Encodes 16S rRNA from Oscillibacter
agagtttgatcatggctcaggacgaacgctggcggcatgcctaacacatgcaagtcgaacgggactcttaacgaccgaggcttcggccaagtgaattttgagtttagtggcggacgggtgagtaacgcgtgagcaacctgcctttcagagggggacaacagttggaaacgactgctaataccgcatgacatacggagggggcatcccttttgtatcaaagattta

SEQ ID NO: 672 - DNA, 225 bp, Unknown
  Encodes 16S rRNA from unknown taxa
agagtttgatcatggctcagggttaacgctagcggtgcgcctaacacatgcaagtcgagcgggaatgtgagaaagcttgctttcaaacaagatagcggcgaacgggtgagtaatatgttggtatctgtccttaagtcaggaatagctcagggaaacttgaattaatgccggatgtgctctttggagtaaagatttatcgcttaagggggagccttcattctatca

SEQ ID NO: 673 - DNA, 225 bp, Unknown
  Encodes 16S rRNA from Prevotella
agagtttgatcatggctcaggatgaacgctagctacaggcttaacacatgcaagtcgcggggcagcatgggagttgcttgcaacttccgatggcgaccggcgcacgggtgcgtaacgcgtatccaacctacccgcaagtcagggccagcccggcgaaagtcggattaatccctgatgtggtgcgaagaggacatctgattcacattaaaggagcgatttgcttgc

SEQ ID NO: 674 - DNA, 225 bp, Unknown
  Encodes 16S rRNA from Saccharofermentans
agagtttgatcatggctcaggacgaacgctggcggcgtgcctaacacatgcaagtcgagcggggataattgacggaaggtttcggccggaaggcgattattctagcggcggacgggtgagtaacgcgtgagcaacctttccttcacagggggataaaacaccgaaaggtgtcctaataccgcatgagaccacgggagcacatgcttttgaggtcaaaggagcaat

SEQ ID NO: 675 - DNA, 225 bp, Unknown
  Encodes 16S rRNA from Erysipelotrichaceae incertae sedis
agagtttgatcctggctcaggattaacgctggcggcatgcctaatacatgcaagtcgaacgagagtagcaatactctagtggcgaacgggtgagtaacacgtaggcaatctacccattagacgaggataactattggaaacgatagctaaaactggataggatatagcgaggcatcttgtaatatttaaaggtcctgaaagggaacactaatggatgagcctgcg

SEQ ID NO: 676 - DNA, 225 bp, Unknown; identical to SEQ ID NO: 466
  Encodes 16S rRNA from Spirochaeta

SEQ ID NO: 677 - DNA, 225 bp, Unknown
  Encodes 16S rRNA from Clostridium XlVa
agagtttgatcatggctcaggatgaacgctggcggcgtgcctaacacatgcaagtcgaacgagcgagagatgaaacctggtgattctcaagcgagtggcggacgggtgagtaacgcgtgggtaacctgccttacagagggggataacagtctgaaaagactgctaataccgcataagcacacagtaccgcatggtacagggtgaaaagatttatcactgtaagat

SEQ ID NO: 678 - DNA, 225 bp, Unknown
  Encodes 16S rRNA from Clostridium XlVb
agagtttgatcatggctcaggacgaacgctggcggcgtgcttaacacatgcaagtcgtacggggtatagcaatatacctagtggcgaacgggtgagtaacacgtgagtaacctgccctatacagggggacaacagctggaaacggctgctaataccgcataagaccacggaaccgcatggttcaggggtaaaaggctacggccggtataggatgggctcgcgcac

SEQ ID NO: 679 - DNA, 225 bp, Unknown
  Encodes 16S rRNA from Clostridium XlVa
agagtttgatcatggctcaggatgaacgctggcggcgtgcctaacacatgcaagtcgagcggagataagttgaagcctagcgattcttatcttagcggcggatgggtgagtaacacgtgggtaacctgccctgtactggggaataacagctggaaacggctgttaatgccgcatatgcgcacggagccgcatgactccgggcggaaagatttatcggtacaggat

SEQ ID NO: 680 - DNA, 225 bp, Unknown
  Encodes 16S rRNA from Adlercreutzia
agagtttgatcctggctcaggatgaacgctggcggcgtgcctaacacatgcaagtcgaacggttaaaccggcttcggccggaaatacagtggcgaacgggtgagtaacacgtgaccaacctgccccgcgcaccgggatagccccccgaaagggggattaataccggatgcgccgggccggccgcatggccggcccgggaaagcccaggcggcgcgggatggggtc

SEQ ID NO: 681 - DNA, 225 bp, Unknown
  Encodes 16S rRNA from Clostridium XlVa
agagtttgatcctggctcaggatgaacgctggcggcgtgcctaacacatgcaagtcgaacggaaatggttgatgaagttttcggatggatttttccattttagtggcggacgggtgagtaacgcgtgggtaacctgccctgtaccgggggataacattcagaaatgagtgataataccgcataagcgcacagcttcgcatgaagcagtgtgaaaaactccggtgg

SEQ ID NO: 682 - DNA, 225 bp, Unknown
  Encodes 16S rRNA from Lachnospiracea incertae sedis
agagtttgatcctggctcaggatgaacgctggcggcgtgcctaacacatgcaagtcgaacgaagctcctttgcggaactcttcggagggaaggaaaggatgactgagtggcggacgggtgagtaacgcgtgggtaacctgccctgtacagggggacaacagttagaaatgactgctaataccgcataagcgtacagcatcgcatgatgcagtacgaaaaactgag

SEQ ID NO: 683 - DNA, 225 bp, Unknown
  Encodes 16S rRNA from Clostridium IV
agagtttgatcatggctcaggatgaacgctggcggcgtgcttaacacatgcaagtcgaacgaggttagagtcttcggattttaaccgagtggcggacgggtgagtaacgcgtgaacaatctgtcctgcaaagggggataacaactggaaacagttgctaataccgcataagaccacagtatcgcatggtacagaggtaaaagcagcaatgcgatgcagggtgagt

SEQ ID NO: 684 - DNA, 225 bp, Unknown
  Encodes 16S rRNA from Adlercreutzia
agagtttgatcctggctcaggatgaacgctggcggcgtgcttaacacatgcaagtcgaacggtcaaaccgccctcgggcggacataaagtggcgaacgggtgagtaacacgtgaccaacctgccccgcgcaccgggacagccccccgaaagggggattaataccggatactccggggagggcgcatgccctccccgggaaagctccggcggcgcgggatggggtc

SEQ ID NO: 685 - DNA, 225 bp, Unknown
  Encodes 16S rRNA from Prevotella
agagtttgatcatggctcaggatgaacgctagcgacaggcctaacacatgcaagtcgaggggcagcatggagtagcaatactctgatggcgaccggcgcacgggtgcgtaacaggtgtgcaatctgtcctataccggggaatagcccagcgaaagttgaattaaagctccatgtgagtgagagccgcatgactcccacttgaaacgtaagggtataggatgagca

SEQ ID NO: 686 - DNA, 225 bp, Unknown
  Encodes 16S rRNA from Syntrophococcus
agagtttgatcatggctcaggatgaacgctggcggcgtgcttaacacatgcaagtcgaacgggaacctcacgacggagacttcggttgaagatgtgagaattctagtggcggacgggtgagtaacgcgtgggtaacctgcccatgagaggaggataacagggagaaattcttgctaatactccatatgcttacggtatcgcatgatacagtgaggaaagaatttc

SEQ ID NO: 687 - DNA, 225 bp, Unknown
  Encodes 16S rRNA from Treponema
agagtttgatcatggctcagaataaacgctggcggcgtgtcttaagcatgcaagtcgaacggcaaggtaccttcgggtaccctagagtggcggactggtgagtaacacgtaggtgacgtaccttttggacggggatagcccgtagaaatacgggataataccggataaggttgcacgggttggagccgtgcaaggaaaggcgctacggcgtcgccgaaagaacgg

SEQ ID NO: 688 - DNA, 225 bp, Unknown
  Encodes 16S rRNA from Prevotella
agagtttgatcatggctcaggatgaacgctagctacaggcttaacacatgcaagtcgtggggcagcacgggaagcagcaatgcttttgggtggcgaccggcgaatgggtgagtaacgagtatccaacctgccccgtgctccgggacagccccgcgaaagcgggattaataccggatggtgcgtgtttcccgcatgggatatacgtcaaagattcatcggcacggg

SEQ ID NO: 689 - DNA, 225 bp, Unknown
  Encodes 16S rRNA from Clostridium III
agagtttgatcctggctcaggacgaacgctggcggcgtgcctaacacatgcaagtcgaacgagaaatatgacaatgatcctttcggggtgatttggattatggacagtggcggacgggcgagtaacgcgtgagtaacctgcccataagagagggatagccgatggaaacgtcgagtaatacctcatattgtaattaattcgcatggattgattatgaaagattta

SEQ ID NO: 690 - DNA, 225 bp, Unknown
  Encodes 16S rRNA from Pseudoflavonifractor
agagtttgatcatggctcaggatgaacgctggcggcgtgcttaacacatgcaagtcgaacggagcatacttgatggtaactgatggtattgcttagtggcggacgggtgagtaacgcgtgaggaacctgccttggagtggggaataacagtcagaaatgattgctaataccgcataatgtatacgggtcgcatggtctgtataccaaagatttatcgctctgaga

SEQ ID NO: 691 - DNA, 225 bp, Unknown
  Encodes 16S rRNA from Clostridium IV
agagtttgatcatggctcaggatgaacgctggcggcgtgcataacacattcaagtcgaacgaagcactttgacggaagccttcgggcggaagttgatttgacttagtggcggacgggtgagtaacgcgtgagcaacctgcctgtatgtgagggataacacagggaaacttgtgctaataccgcatgaagcatgggaatcgcatggttttgatgccaaagacttgt

SEQ ID NO: 692 - DNA, 225 bp, Unknown
  Encodes 16S rRNA from Sharpea
agagtttgatcatggctcaggattaacgctggcggcgtgcctaatacatgcaagtcggccggggaggggaaagcttgctttcacctcccaggggcgaacgggtgagtaatacgtaagcaacctgcccgcgggtccgggataagccctggaaacggggtctaagaccggataggcggcgggggcgcatgccccctccgttaaaggcgagaaacgcctgcggatggg

SEQ ID NO: 693 - DNA, 225 bp, Unknown
  Encodes 16S rRNA from Dongia
agagtttgatcatggctcagaacgaacgctggcggcacgcttaacacatgcaagtcgaacggtgcaatggggcttgctctattgcatagtggcggacgggtgagtaacacgtaggaacctacctggtaatggtggatagcttcgggaaactggaggtaatacagcatgagctcgagagaggaaaggccataaggtcgttaccagaggggcctgcggatgattagg

SEQ ID NO: 694 - DNA, 225 bp, Unknown
  Encodes 16S rRNA from Eubacterium
agagtttgatcatggctcaggacgaacgctggcggcgtgcctaacacatgcaagtcgaacgaagcttgaattcagaattcttcggaaggacgaatgaaatgactgagtggcggacgggtgagtaacgcgtgagcaacctgccctttggatggggatagcgtttggaaacgaacggtaatacccaataaagtatatttgtggcatcgcagatataccaaagctccg

SEQ ID NO: 695 - DNA, 225 bp, Unknown
  Encodes 16S rRNA from Prevotella
agagtttgatcatggctcaggatgaacgctagctacaggcttaacacatgcaagtcgaggggcagcatgtcgtgtgcttgcacacgatgatggcgaccggcgcacgggtgagtaacgcgtatccaacctgcccatgaccccgggatagcccgctgaaaagcggattaacaccggatgtggtcgaacgaggacatctgatttcgaccaaagcttttttgcggtcat

SEQ ID NO: 696 - DNA, 225 bp, Unknown
  Encodes 16S rRNA from Clostridium IV
agagtttgatcatggctcaggacgaacgctggcggcgtgcttaacacatgcaagtcgaacgagaacctgtggaaggagttttcggacaacggaaacaggggaaagtggcggacgggtgagtaacgcgtgaggaacctgccttggagagggggacaacagctggaaacggctgctaataccgcatgatgcacgatggggacatccccgacgtgccaaagatttatc

SEQ ID NO: 697 - DNA, 204 bp, Unknown
  Encodes 16S rRNA from Parabacteroides
agagtttgatcatggctcaggatgaacgctagcgacaggctttggtcaatggacgctagtctgaaccagccaagtcgcgtgcgggatgaaggccctccgggtcgtaaaccgctttagccggggagtaacgtgggggacgcgtccctcagtgagagtacccggagaataagcatcggctaactccgtgccagcagccgcggtaat

SEQ ID NO: 698 - DNA, 225 bp, Unknown; identical to SEQ ID NO: 518
  Encodes 16S rRNA from Brevundimonas

SEQ ID NO: 699 - DNA, 225 bp, Unknown
  Encodes 16S rRNA from Clostridium XlVa
agagtttgatcctggctcaggatgaacgctggcggcgtgcttaacacatgcaagtcgaacggactttactgaaaagagggcttgcccgatggaaggtaaagttagtggcggacgggtgagtaacgcgtgggtaacctgccttacacagggggacaacagttggaaacgactgctaataccgcataagccggtagtgccgcatggcacatccggaaaagatttatc

SEQ ID NO: 700 - DNA, 225 bp, Unknown
  Encodes 16S rRNA from Ruminococcus
agagtttgatcctggctcaggacgaacgctggcggcacgcttaacacatgcaagtcgaacggaacttgggagcttgctttcaagtttagtggcggacgggtgagtaacacgtgagcaacctgcctttcggcggggaataatgattggaaacgatcactaataccccataaaataaatttaccgcatgataaatttatcaaagattcatcaccgaaagatgggctc

SEQ ID NO: 701 - DNA, 225 bp, Unknown
  Encodes 16S rRNA from Thermotalea
agagtttgatcctggctcaggattaacgctggcggcgtgcctaacacatgcaagtcgagcgagaattgacagaatgaaacttcggtggaattcagtcaaggacagcggcggacgggtgagtaacgcgtgggcaacctgcccctttccggaggatagccaagggaaactttgaataatactccataaagcatcattaccgcatgatagagatgccaaagatttatc

SEQ ID NO: 702 - DNA, 225 bp, Unknown
  Encodes 16S rRNA from Victivallis
agagtttgatcctggctcagaacgaacgctggcggcatggattaggcatgcaagtcgaacggtgcagcaatgcatagtggcgcaagggtgaggaacgcgtgagtaatctgccctcaagttgggaacagcttctggaaacggaaattaataccgaatgtgatctcagggaggcatctttctgggattaaaggccgcaaggtcgcttgaggaggggctcgcgtccca

SEQ ID NO: 703 - DNA, 225 bp, Unknown
  Encodes 16S rRNA from Anaeroplasma
agagtttgatcatggctcaggattaacgctggcggcgtgcctaatacatgcaagtcgaatggttagcttgctaaccatggcgaacgggtgagtaacacgtaggcaacctgtctatcagccgaggataaccattggaaacgatggataatactggataggatatagataggcatctaattatatttaaagatttatcactgatagaggggcctgcggcgcattagc

SEQ ID NO: 704 - DNA, 225 bp, Unknown
  Encodes 16S rRNA from Oscillibacter
agagtttgatcctggctcaggacgaacgctggcggcgtgcctaacacatgcaagtcgaacgaagctccgagaaacaagacttcggtcaagcggaacggatgactgagtggcgaacgggtgagtaacgcgtgaggaacctgcctttcagtgggggataacagttggaaacgactgctaataccgcatgaagtattctgggggcatccccggggtaccaaagattta

SEQ ID NO: 705 - DNA, 225 bp, Unknown
  Encodes 16S rRNA from Ruminococcus
agagtttgatcctggctcaggacgaacgctggcggcacgcctaacacatgcaagtcgagcggtgaattttggatttattcgagattcatagcggcggacgggtgagtaacacgtgagcaacctacctctaagtgagggatagcttctggaaacggatggtaataccttataatatatatttatcacatgatagatatatcaaagatttattgcttagagatgggc

SEQ ID NO: 706 - DNA, 225 bp, Unknown
  Encodes 16S rRNA from Clostridium XlVa
agagtttgatcctggctcaggatgaacgctggcggcgtgcctaacacatgcaagtcgaacgaggctctgcgaaatgaagattcgtctgaatttcaaggatgtccgagtggcggatgggtgagtaacgcgtggagaacctgccctatgctgggggataacaactggaaacggttgacaataccgcataagcttccttagtcgcatgaccttggaaggaaagattta

SEQ ID NO: 707 - DNA, 225 bp, Unknown
  Encodes 16S rRNA from Clostridium XlVa
agagtttgatcctggctcaggatgaacgctggcggcgtgcttaacacatgcaagtcgaacgaatttccttcgaacagaggcttcggccaacgggagattgaagtgagtggcggacgggtgagtaacgcgtgggtaacctgccttacaccgggggataacagagggaaacttctgctaataccgcataagaccacggtaccgcatggtacagaggtaaaagttccg

SEQ ID NO: 708 - DNA, 225 bp, Unknown
  Encodes 16S rRNA from Clostridium IV
agagtttgatcatggctcaggatgaacgctggcggcgtgcttaacacattcaagtcgaacgaagcatattggaacgagacttcggtcaagggaaggtatgacttagtggcggacgggtgagtaacgcgtgagcaacctgcctcggggtgcgggataacgattggaaacgaccgctaataccgcatgacgcatatttttcgcatgtgagatatgccaaagattcat

SEQ ID NO: 709 - DNA, 225 bp, Unknown
  Encodes 16S rRNA from Roseburia
agagtttgatcatggctcaggatgaacgctggcggcgtgcttaacacatgcaagtcgaacggagatgtttcgctggggcggcttcggccaaaccttgaggcatcttagtggcggacgggtgagtaacgcgtgggtaacctgcctatcacagggggacaacagttggaaacgactgctaataccgcataagcgcacggcaccgcatggtgcagtgtgaaaagattc

SEQ ID NO: 710 - DNA, 225 bp, Unknown
  Encodes 16S rRNA from Eggerthella
agagtttgatcctggctcaggatgaacgctggcggcgtgcctaacacatgcaagtcgaacggagaaaccgccctcgggcggagatgaagtggcgaacgggtgagtaacacgtgaccaacctgccccgcgcaccgggacagccccccgaaagggggattaataccggatgcgccggccgggccgcatggcccggccgggaaagcccaggcggcgcgggatggggtc

SEQ ID NO: 711 - DNA, 225 bp, Unknown
  Encodes 16S rRNA from Clostridium III
agagtttgatcatggctcaggacgaacgctggcggcgtgcctaacacatgcaagtcgaacggacatactagcaatagtatgttagtggcggacgggtgagtaatacatgagtaacctgccttatacagggggataacacttagaaataggtgctaataccgcataataacccttggtggcatcaccaggggaggaaaggagaaatccagtaaaagatgggctcat

SEQ ID NO: 712 - DNA, 225 bp, Unknown
  Encodes 16S rRNA from Clostridium XlVa
agagtttgatcctggctcaggatgaacgctggcggcgtgcctaacacatgcaagtcgaacggggtacagacgctgtgagaagaagtgcttgcacggaatcgaacttgtttgtacttagtggcggacgggtgagtaacgcgtggaaaacctgcctcatacagggggataacaggaagaaattcctgctaataccgcataagcgcacagtatcgcatgatagagtgt

SEQ ID NO: 713 - DNA, 225 bp, Unknown
  Encodes 16S rRNA from Lactobacillus
agagtttgatcatggctcaggacgaacgctggcggcgtgcctaatacatgcaagtcgaacgcatcccgttgaattgaagtgcttgcactgatttttaacatcggatgagtggcgaactggtgagtaacacgtgggtaacctgcccagaagcgggggataacacttggaaacaggtgctaataccgcataacaacagaaaccgcatggtttctgtttgaaagatgg

SEQ ID NO: 714 - DNA, 225 bp, Unknown
  Encodes 16S rRNA from Bacteroides
agagtttgatcctggctcaggatgaacgctagctacaggcttaacacatgcaagtcgaggggcagcatgacgatagcttgctattgttgatggcgaccggcgcacgggtgcgtaacacgtatccaatctacccggtactcggggatagcctttcgaaagaaagattaatacccgatactgttggatctccgcatggcggtccaaccaaagatttcatcggtgccg

SEQ ID NO: 715 - DNA, 225 bp, Unknown
  Encodes 16S rRNA from Cellulosilyticum
agagtttgatcatggctcaggatgaacgctggcggcgtgcctaacacatgcaagtcgagcggagataatgcaccggatgaagattcgtcggattccaccgcgttatcttagcggcggatgggtgagtaacacgtggacaacctgcccataactgggggatagcagttggaaacgactgataataccgcatatgctcacagcaccgcatggtgcagggaggaaaga

SEQ ID NO: 716 - DNA, 225 bp, Unknown
  Encodes 16S rRNA from Brevundimonas
agagtttgatcatggctcaggacgaacgctggcggtgtgcctcatacatgcaagtcgaacgataaggtctcttcggagatacataagtggcggacgggtgagtacaacataggaaatctgccttagggtgggggacaacagagggaaactcctgctaataccccatatgagctaacttgaaatagttatcttgaaaactccggtgccctaagatgagcctgtgcc

SEQ ID NO: 717 - DNA, 225 bp, Unknown
  Encodes 16S rRNA from Clostridium IV
agagtttgatcatggctcaggatgaacgctggcggcgtgcataacacattcaagtcgaacgaagcactgacgatgaagtcttcggacggaattgtctttgacttagtggcggacgggtgagtaacgcgtgagcaaccttcctgtttgtgagggataacacagggaaacttgtgctaataccgcatgacgcatgggaatcgcatggtttcgatgccaaagatttat

SEQ ID NO: 718 - DNA, 225 bp, Unknown
  Encodes 16S rRNA from Prevotella
agagtttgatcctggctcaggatgaacgctagctacaggcttaacacatgcaagtcgaggggcagcatgacgagtgcttgcacttgttgatggcgaccggcgcacgggtgcgtaacgcgtatcgaaccttccccttactcgggaatagcccggtgaaaaccgaattaatgcccgatatatatttagatggcatcagaagagtatgaaagatttatcggtaaggga

SEQ ID NO: 719 - DNA, 225 bp, Unknown
  Encodes 16S rRNA from Helicobacter
agagtttgatcatggctcagagttaacgctggcggcgtgcctaacacatgcaagtcgagcgagtgcttgtaaagactagcggcaaacgggtgagtaacacatgggaaaccttccttagaatgggggatatctccgtgaaaacggagctaataccgcataagaccacagtttggcatcgaacaggggtaaaagcagcaatgtgttctaagatggtcctgtgtccta

SEQ ID NO: 720 - DNA, 225 bp, Unknown
  Encodes 16S rRNA from Clostridium IV
agagtttgatcctggctcaggacgaacgctggcggcacgcttaacacatgcaagtcgaacggagttgtattagcttgctaatataacttagtggcggacgggtgagtaacacgtgagcaacctgccttcgagagtggaataatgtttggaaacggacactaataccgcatgacatacggaattcgcatgtttttcgtatcaaagatttatcgctcgaagatgggc

SEQ ID NO: 721 - DNA, 225 bp, Unknown
  Encodes 16S rRNA from Proteiniclasticum
agagtttgatcatggctcaggacgaacgctggcggtatgcctaacacatgcaagtcgaacgaaaacggggcttgctctcgtttttagtggcgcacgggtgagtaacgcgtgagtaatctgccttaaagtggggaacaacatttggaaacgaatgctaataccgcgtaatatacagttttcgcatgaattttgtattatagatttatcgctttaagatgagctcgc

SEQ ID NO: 722 - DNA, 225 bp, Unknown
  Encodes 16S rRNA from Brevundimonas
agagtttgatcatggctcagagcgaacgctggcggcaggcctaacacatgcaagtcgaacgaactcttcggagttagtggcggacgggtgagtaacacgtgggaacgtgcctttaggttcggaataactcagggaaacttgtgctaataccgaatgtgcccttcgggggaaagatttatcgcctttagagcggcccgcgtctgattagctagttggtgaggtaaa

SEQ ID NO: 723 - DNA, 225 bp, Unknown
  Encodes 16S rRNA from Clostridium XlVa
agagtttgatcatggctcaggatgaacgctggcggcgcgcataacacatgcaagtcgaacggagtcacattgaaacctagtgatttgtgacttagtggcggacgggtgagtaacgcgtgggtaacctgcctggtattgggggacaacagttagaaatgactgctaataccgcatacgacatccggagggcatcctctggatgggaaaggatttatccgatatcag

SEQ ID NO: 724 - DNA, 204 bp, Unknown
  Encodes 16S rRNA from Prevotella
agagtttgatcctggctcaggatgaacgctagctacaggctttggtcaatgggcggaagcctgaaccagccaagtagcgtgcaggatgacggccctatgggttgtaaactgcttttatgcgggaataaagaggctcacgtgtgggctgttgcatgtaccgcatgaataaggaccggctaattccgtgccagcagccgcggtaat

SEQ ID NO: 725 - DNA, 225 bp, Unknown
  Encodes 16S rRNA from Desulfovibrio
agagtttgatcatggctcagattgaacgctggcggcgtgcttaacacatgcaagtcgaacgcgaaaggggcttcggccccgagtagagtggcgcacgggtgagtaacgcgtggataatctgcccctgcaactggaatagcgactggaaacggtcgataataccggatacgcccttgttgaactatgaggggaaaggagacctctgcttgcaagtttccgtgcagg

SEQ ID NO: 726 - DNA, 225 bp, Unknown
  Encodes 16S rRNA from Coraliomargarita
agagtttgatcatggctcagagtgaacgctggcggcgtggctaagacatgcaagtcgggcggttgtgcgccttcgggtgtacaatagcggcaaacgggtgagtaacacgtaagtaacctgcccttaagactgggatagcccagcgaaagttggggtaataccggatgaggacctttagcgcatgttaagggatcgaaaggtatgagaagacgcttaaggaggggc

SEQ ID NO: 727 - DNA, 225 bp, Unknown
  Encodes 16S rRNA from Eubacterium
agagtttgatcatggctcaggatgaacgctggcggcgtgcttaacacatgcaagtcgagcgagaaatgactgacggattcttcggatgacggaggtcatggacagcggcggacgggtgagtaacgcgtgggcaacctgcccttaactgagggatagccgagggaaacttcgtgtaatacctcataacgcattttgaccgcatgatcgaaatgccaaagatttatc

SEQ ID NO: 728 - DNA, 225 bp, Unknown
  Encodes 16S rRNA from Sphingomonas
agagtttgatcatggctcagagcgaacgctagcggcatgcttaacacatgcaagtcgaacgagggaagttgattgagtagcaatacgatttcaatggaacgagtggcaaacgggtgagtaatatattggaacttgcccagtagtgggggacaacagttggaaacgactgctaataccgcataacgcagagatgcgaaagccgaaaggcgctattggagaggccaa

SEQ ID NO: 729 - DNA, 225 bp, Unknown
  Encodes 16S rRNA from Prevotella
agagtttgatcctggctcaggatgaacgctagctacaggcttaacacatgcaagtcgaggggtaacatgaagaaagcttgctttctttgatgacgaccggcgcacgggtgagtatcgcgtatccaacctgcccataagtagggaatagccttgcgaaagtaagattaatgccctatggtttccgtcgtagacatcttagatggaataaagatttatcgcttatgg

SEQ ID NO: 730 - DNA, 225 bp, Unknown
  Encodes 16S rRNA from Clostridium IV
agagtttgatcctggctcaggacgaacgctggcggtatgcctaacacatgcaagtcgaacgggtgttgaagagcttgctcttcttctactagtggcggacgggtgagtaacgcgtgagtaatctgcctcaaagtgggggataacacttagaaatgagtgctaataccgcgtaatgtgctaacttcgcatgaagtctgcaccatggtttttcgctttgagatgagc

SEQ ID NO: 731 - DNA, 225 bp, Unknown
  Encodes 16S rRNA from Paraprevotella
agagtttgatcatggctcaggatgaacgctagcggcaggcttaacacatgcaagtcgaggggcagcgagtcggtagcaatactgatgtcggcgaccggcgcacgggtgagtaacgcgtatgcaacctttcccagacagggggatagcccagggaaacttggattaataccccgtaggccgagggatggcatcgtccttcggttaaagttccggcggtctggggtg

SEQ ID NO: 732 - DNA, 225 bp, Unknown
  Encodes 16S rRNA from Ruminococcus
agagtttgatcctggctcaggacgaacgctggcggcacgcttaacacatgcaagtcgaacggagttaaaggagcttgctcctttaacttagtggcggacgggtgagtaacacgtgagcaacctgccttacagagaggaataatgattggaaacggtcactaatacctcataaaatatctatactgcatggtataggatatcaaagatttatcgctgtaagatggg

SEQ ID NO: 733 - DNA, 225 bp, Unknown
  Encodes 16S rRNA from Saccharofermentans
agagtttgatcatggctcaggatgaacgctggcggcgcatttaagacatgcaagtcgaacgaagaatttgcaccgaatgaaagatgaagattcatcagattctggatttcaccgtaaattcttagtggcggacgggtgagtaatacgtagataatctgccttctagagggaaataacagagagaaatttctgctaatgtcccataagaccacactatggcatctt

SEQ ID NO: 734 - DNA, 225 bp, Unknown
  Encodes 16S rRNA from Clostridium III
agagtttgatcctggctcaggacgaacgctggcggcgtgcctaacacatgcaagtcgagcggagccatccgaaagatcccttcggggtgattttggtgaagcttagcggcggacgggtgagtaacgcgtgagtaacctgcccattagtggggaataacacagagaaatttgtgctaataccgcataccgatgcgggagggcatcctcctgtattgaaagatttat

SEQ ID NO: 735 - DNA, 225 bp, Unknown
  Encodes 16S rRNA from Clostridium III
agagtttgatcatggctcaggacgaacgctggcggcgtgcctaacacatgcaagtcgaacgaacgaggtagcaatactgagttagtggcggacgggtgagtaatgcatgagcaacctacctcatacagggggatagcacttagaaatgagtggtaataccgcataataaccatacatggcatcatgtaaggaggaaaggaggaatccggtaagagatgggctcat

SEQ ID NO: 736 - DNA, 225 bp, Unknown
  Encodes 16S rRNA from Turicibacter
agagtttgatcatggctcaggatgaacgctggcggcgtgcctaatacatgcaagtcgaacgagagtacttgtactcgagtggcgaacgggtgagtaacacgtaggtaacctgcctttcagtttgggatacccagaggaaactttggctaataccggataactggtctggaggcatctccggatcctaaaaggggctccaaagcctcgctgattgatggacctgcg

SEQ ID NO: 737 - DNA, 225 bp, Unknown
  Encodes 16S rRNA from Prevotella
agagtttgatcatggctcaggatgaacgctagctacaggcttaacacatgcaagtcgaggggcagcatgtatctggcttgccagatatgatggcgaccggcgcacgggtgcgtaacgcgtatccaacctgccgtttacccggggacagcctcgcgaaagcgagattaatacccgatgttgtgcgtattccgcatggtgtgcgcaccaaaggtttttccggtaagc

SEQ ID NO: 738 - DNA, 225 bp, Unknown
  Encodes 16S rRNA from Clostridium XlVa
agagtttgatcctggctcaggatgaacgctggcggcgtgcctaacacatgcaagtcgagcggggatgcgccaaagatgatgactcgtctgattcttagcgcatcttagcggcggatgggtgagtaacgcgtggacaacctgcccgcaacagggggataacagctggaaacggctgataataccgcatatgcacacgtggccgcatggccatgggtggaaagattt

SEQ ID NO: 739 - DNA, 225 bp, Unknown
  Encodes 16S rRNA from Fusibacter
agagtttgatcctggctcaggatgaacgctggcggcgtgcctaacacatgcaagtcgagcgagaaatcgctcaatgatctttcgggtgatttgagcgatggaaagcggcggacgggtgagtaacgcgtaggtaacctgccccatacagagggatagccactggaaacggtgattaatacctcataacaccggaatatcgcatggtataccggtcaaagtttttcg

SEQ ID NO: 740 - DNA, 225 bp, Unknown
  Encodes 16S rRNA from Clostridium XlVa
agagtttgatcctggctcaggatgaacgctggcggcgtgcctaacacatgcaagtcgaacgaagctctcttttggaacccttcggggtgaagaaggagatgactgagtggcggacgggtgagtaacgcgtgggtaacctgccctgtacagggggacaacagttagaaatgactgctaataccgcataagcgcacagcaccgcatggtgccgtgtgaaaagccttt

SEQ ID NO: 741 - DNA, 225 bp, Unknown
  Encodes 16S rRNA from Clostridium IV
agagtttgatcatggctcaggacgaacgctggcggcacgcttaacacatgcaagtcgaacggagttaatgaagcttgctttattaacttagtggcggacgggtgagtaacacgtgagcaacctgccttacagagaggaataatgattggaaacgatcactaatacctcataacatatttgaatcgcatggtttggatatcaaagatttatcgctgtaagatgggc

SEQ ID NO: 742 - DNA, 225 bp, Unknown
  Encodes 16S rRNA from Rummeliibacillus
agagtttgatcatggctcaggacgaacgctggcggcgtgcctaatacatgcaagtcgagcgaatgacgaggagcttgctcctctgatttagcggcggacgggtgagtaacacgtgggtaacctgccctgtagactgggataacttcgggaaaccggagctaataccggataattcttttaacctcatggttttaagctgaaaggcgcttcggcgtcactacagga

SEQ ID NO: 743 - DNA, 225 bp, Unknown
  Encodes 16S rRNA from Mogibacterium
agagtttgatcctggctcaggatgaacgctggcggcgtgcctaatacatgcaagtcgagcgagaatcaatagatcagcgatttatcaaagagacattgaggaaagcggcggacgggtgagtaacgcgtaggcaacctgcccctggcagagggatagccattggaaacgatgattaaaacctcataacgccggaagcacacatgtgctatcggccaaagatttatc

SEQ ID NO: 744 - DNA, 225 bp, Unknown
  Encodes 16S rRNA from Bacteroides
agagtttgatcatggctcaggatgaacgctagcgacaggcctaacacatgcaagtcgagggagaagttggaggtagcttgctactgaagatggaaaccggcgcacgggtgcgtaacaggtatgcaatctgtcctataccggaggatagcccactgaaaggtggattaatactccatgtgccactgcggggcatcctatggtggtgaaacttgagggtatagggtg

SEQ ID NO: 745 - DNA, 225 bp, Unknown
  Encodes 16S rRNA from Pelospora
agagtttgatcatggctcaggatgaacgctggcggcgcgcttaacacatgcaagtcgaacggaatgattgacttcggtcatgaattcagtggcggacgggtgagtaacacgtggataacttgccttttagtgggggatagctgagagaaatctcaattaataccgcataacgtgatttattcgcatggatagattaataaaggtgaaaatcgctaaaagataggt

SEQ ID NO: 746 - DNA, 225 bp, Unknown
  Encodes 16S rRNA from Eggerthella
agagtttgatcatggctcaggatgaacgctggcggcgtgcttaacacatgcaagtcgaacgattaaaccacttcggtggatatagagtggcgaacgggtgagtaacacgtgggcaacctgcccctcacaccgggacaactattggaaacgatagctaataccggatactccgatcgcgtggcatcacgctttcgggaaagcccagacggtgagggatgggcccgc

SEQ ID NO: 747 - DNA, 225 bp, Unknown
  Encodes 16S rRNA from Eubacterium
agagtttgatcctggctcaggatgaacgctggcggcgtgcttaacacatgcaagtcgaacggaacttatcttctgaagttttcggatggacgaaggtaagtttagtggcggacgggtgagtaacgcgtgggtaacctgccctgtacagggggataacagttagaaatgactgttaataccgcataagaccacagcaccgcatggtgcaggggtaaaagctgcgac

SEQ ID NO: 748 - DNA, 225 bp, Unknown
  Encodes 16S rRNA from Blautia
agagtttgatcatggctcaggatgaacgctggcggcgtgcctaacacatgcaagtcgaacggagcttacttttttaatacttcggtaagcgagaagtaagcttagtggcggacgggtgagtaacgcgtggagaacctgccctgtactgggggataacagtgagaaatcactgctaataccgcataagcgcacggagccgcatggcccagtgtgaaaaactccggt

SEQ ID NO: 749 - DNA, 225 bp, Unknown
  Encodes 16S rRNA from Clostridium XlVb
agagtttgatcatggctcaggatgaacgctggcggcgtgcctaacacatgcaagtcgagcgaagttttaggaaagcttgctttccgaagaacttagcggcggacgggtgagtaacgtgtgggtaacttgccctatgcagagggataacagtgagaaatcactgctaatacctcataagctcacactttcacatgggagagtgagaaaagatttatcggcatagga

SEQ ID NO: 750 - DNA, 225 bp, Unknown
  Encodes 16S rRNA from Ehrlichia
agagtttgatcatggctcagaacgaacgctggcggtatgctttaaccatgcaagtcgaacgagaaagggtagcaatacctgagtaaagtggcaaacgggtgagtaacacacaggaatctacccagtagaggggaataagcactggaaacggtgtctaatactccatacgccggtatagcaatatatcgggaaagggctagtagcaatattagttcactattggat

SEQ ID NO: 751 - DNA, 225 bp, Unknown
  Encodes 16S rRNA from Eubacterium
agagtttgatcctggctcaggatgaacgctggcggcgtgcttaacacatgcaagtcgagcgagaatcgaggaaacgatacttcggtaaagcggaatcgaggacagcggcggacgggtgagtaacgcgtgggcaacctgccccttactggtggatagccgcgggaaactgcgagtaatacaccataatgcatcgatgagacatctcaatgatgccaaagatttatc

SEQ ID NO: 752 - DNA, 154 bp, Unknown
  Encodes 16S rRNA from Prevotella
agagtttgatcatggctcagattgaacgctggcggcaggcttaacacatgcaagtcgtacggtaacagaggggaataaagtgaggtacgtgtacctttttgtatgtaccctatgaataaggaccggctaattccgtgccagcagccgcggtaat

SEQ ID NO: 753 - DNA, 225 bp, Unknown
  Encodes 16S rRNA from Clostridium XlVa
agagtttgatcatggctcaggatgaacgctggcggcgtgcctaacacatgcaagtcgagcggagtttaggggaaggcggattcgtccaacggaacctaaacttagcggcggatgggtgaggaacgcgtggataacctaccgtgcacagggggataacagttggaaacgactgttaataccgcatatgctcacagtaccgcatggtacagggaggaaagatttatc

SEQ ID NO: 754 - DNA, 225 bp, Unknown
  Encodes 16S rRNA from Treponema
agagtttgatcatggctcagaacgaacgctggcggcgcgtcttaagcatgcaagtcgaacggcaagatggtagcttgctactatcctagagtggcggactggtgagtaacacgtgggtgacgtacccttcagacggggatagctggtagaaatatcagataataccggatacgattctgtaagttagaggtacagaaggaaaggagctatggcttcgctgaagga

SEQ ID NO: 755 - DNA, 225 bp, Unknown
  Encodes 16S rRNA from Hydrogenoanaerobacterium
agagtttgatcatggctcaggataaacgctggcggcgcacataagacatgcaagtcgaacgggaactttattgaagttatctgatataaagttctagtggcggactggtgagtaatgtataagcaacctgcctataagaggggaataacagtgagaaatcattgctaataccgcataagctgtgagaatggcatcattcaaacagaaaaggaagcaattccgctt

SEQ ID NO: 756 - DNA, 225 bp, Unknown
  Encodes 16S rRNA from Selenomonas
agagtttgatcatggctcaggacgaacgctggcggcgtgcttaacacatgcaagtcgaacggggcgattgaaagcttgcttttatgagcctagtggcaaacgggtgagtaacgcgtgggcaacctgccggaaagatggggacaacatcccgaaaggggtgctaataccgaatgttgtatataaggcgcatgccttgtatattaaaggatctaatccgctttccga

SEQ ID NO: 757 - DNA, 225 bp, Unknown
  Encodes 16S rRNA from Saccharofermentans
agagtttgatcatggctcaggatgaacgctggcggcgtgcataacacattcaagtcgaacggactcaggggcttcggccccgaaagtcagtggcggacgggtgagtaacgcgtgagcaacctgcctccggaagagggataacagttggaaacgactgctaataccgcataacactgcgagtacgcatgtacatgcagtcaaaggagcaatccgaccggagatggg

SEQ ID NO: 758 - DNA, 225 bp, Unknown
  Encodes 16S rRNA from Clostridium IV
agagtttgatcctggctcaggattaacgctggcggcgtgcataacacattcaagtcgaacggacggaagagcttcggttcttacgtcagtggcggacgggtgagtaacgcgtgagcaatctgccctttacagcgggataacacagagaaatttgtgctaatacggcataacatatcggagtcgcatggcattggtatcaaagatttatcggtaaaggatgagctc

SEQ ID NO: 759 - DNA, 225 bp, Unknown
  Encodes 16S rRNA from Clostridium sensu stricto
agagtttgatcatggctcaggacgaacgctggcggcgtgcctaacacatgcaagtcgagcggggactgcgcgacggacctgaagatttcggttggatgggaagatgcacagttctagcggcggacgggtgagtaacgcgtgagcaacctgtcccttacagggggataacacagcgaaagttgtactaataccgcataagaccacggcatcacatggtggtggggt

SEQ ID NO: 760 - DNA, 225 bp, Unknown
  Encodes 16S rRNA from Anaerovorax
agagtttgatcatggctcaggatgaacgctggcggcgtgcctaacacatgcaagtcgagcgggagtataccaaacagagattcgtcgaagtaaggtatatgagagcggcggacgggtgagtaacgcgtaggtaacctaccttaagctgagggataacccagggaaacttgggataataccacataacgcggtgaagtcacatggctttaccgccaaagatttatc

SEQ ID NO: 761 - DNA, 225 bp, Unknown
  Encodes 16S rRNA from Spirochaeta
agagtttgatcatggctcagaacgaacgctggcggcgcgttttaagcatgcaagtcgagcggtaagccggagcaatccggcctagagcggcggacgggtgagtaacacgtggataatctggcctacagtttgggatagcctggtgaaagccaggataataccggatacgacagttttaacagaagttaagattgggaaaggggctaaggcctcgctgaaggatga

SEQ ID NO: 762 - DNA, 225 bp, Unknown
  Encodes 16S rRNA from Brevundimonas
agagtttgatcatggctcaggacgaacgctggcggcgtgcttcatacatgcaagtcgaacgagaatctctagcttgctagagaggaaagtggcggacgggtgagtaatatgtagagaatctgccctagagagggggacaacagagggaaactcctgctaataccccatatgagcgtacctgtgatggtattcttgaaaactccggtgctctaggatgagtctgca

SEQ ID NO: 763 - DNA, 225 bp, Unknown
  Encodes 16S rRNA from Eubacterium
agagtttgatcctggctcaggatgaacgctggcggcgtgcctaacacatgcaagtcgagcgagaaacttttgtgatgaagcttcggtagattctttaaagtggaaagcggcggacgggtgagtaacgcgtaggcaacctgcccttagcagggggatagccattggaaacgatgattaaaaccccataatgcagagagttcacatgtattttctgccaaagattta

SEQ ID NO: 764 - DNA, 225 bp, Unknown
  Encodes 16S rRNA from Clostridium XlVa
agagtttgatcatggctcaggatgaacgctggcggcgtgcctaacacatgcaagtcgaacggagttgtttctatccgacagatcatcttcggatgtgaagtcaccagaaacgcttagtggcggacgggtgagtaacgcgtgggcaacctgccctgcacagggggatagcggttggaaacgaccggtaataccgcataccttgtatttaacgcatgttagatataa

SEQ ID NO: 765 - DNA, 225 bp, Unknown
  Encodes 16S rRNA from Anaerovorax
agagtttgatcctggctcaggatgaacgctggcggcgtgcctaacacatgcaagtcgagcgagaatcttagaagtgaagtttcgatggatcttttaagaggagagcggcggacgggtgagtaacgcgtaggcaacctgcctcacactgagggatacttccgggaaactggaactaatacctcataacgcgagagtttcacatgttactctcgccaaagatttatc

SEQ ID NO: 766 - DNA, 225 bp, Unknown
  Encodes 16S rRNA from Ruminococcus
agagtttgatcctggctcaggacgaacgctggcggcacgcttaacacatgcaagtcgaacggagtattttggagcttgctctgagatgcttagtggcggacgggtgagtaacacgtgagcaacctgccttcaagtgcggaatagcttctggaaacggatggtaataccgcataatgttatctggccgcatgaccggataaccaaagaaattcgcttgaagatggg

SEQ ID NO: 767 - DNA, 225 bp, Unknown
  Encodes 16S rRNA from Papillibacter
agagtttgatcatggctcaggacgaacgctggcggcgtgcttaacacatgcaagtcgaacggagttatttccgacacggagccacttgagagagtggttgcgtgttggggataacttagtggcgaacgggtgagtaacgcgtaagcaatctgccttacagagggggataacgtttggaaacgaacgctaataccgcataacgtcatgaagaggcatctttttatg

SEQ ID NO: 768 - DNA, 225 bp, Unknown
  Encodes 16S rRNA from Clostridium IV
agagtttgatcatggctcaggatgaacgctggcggcgcgcctaacacatgcaagtcgaacggagttatcttattagatcccttcggggtgacgattttttaacttagtggcgaacgggtgagtaacgcgtgagtaacctgccttcaagagggggacaacagttggaaacgactgctaataccgcataacataacgaagccgcatgactttgttatcaaaggagca

SEQ ID NO: 769 - DNA, 225 bp, Unknown
  Encodes 16S rRNA from Hydrogenoanaerobacterium
agagtttgatcatggctcaggatgaacgctggcggcgtgcctaacacatgcaagtcgaacggaactttttacggacaagacttcggtcaagtctgtttcaagtttagtggcggacgggtgagtaacgcgtgagcaacctgcctttcagagggggataacgttcggaaacgatcgctaataccgcataacatagggatatcgcatggtaaccctatcaaagatttt

SEQ ID NO: 770 - DNA, 225 bp, Unknown
  Encodes 16S rRNA from Asaccharobacter
agagtttgatcatggctcaggatgaacgctggcggcgtgcttaacacatgcaagtcgaacgagaaagcaccttcgggtgtgagtagagtggcgaacgggtgagtaacacgtgagcaacctgcctttcacatcgggataacctatggaaacgtaagctaataccgaatactccatttccttcgcatgttggatctgggaaagctttagcggtgaaagatgggctcg

SEQ ID NO: 771 - DNA, 225 bp, Unknown
  Encodes 16S rRNA from Clostridium XlVa
agagtttgatcctggctcaggatgaacgctggcggcgtgcttaacacatgcaagtcgaacgaagcagctttgaaggagatttcggtcaatggataagctgacttagtggcggacgggtgagtaacgcgtgggcaacctgcctcatggagggggacaacagttggaaacgactgctaataccgcataagaccaagcatcgcatgatgcaatggtaaaagatttatc

SEQ ID NO: 772 - DNA, 225 bp, Unknown
  Encodes 16S rRNA from Rhodocista
agagtttgatcctggctcagaacgaacgctggcggcaggcttaacacatgcaagttgaacggtattgtgaagtgcttgcactgcacaagagagtagcgcactggtgagtaacacgtgggaacatgccctaaagtacgggatagcgtctggaaacggacgataatacggtatacgccctgagggggaaagatttatcgctttaggattggcccgcggaagattagg

SEQ ID NO: 773 - DNA, 225 bp, Unknown
  Encodes 16S rRNA from Clostridium XlVa
agagtttgatcatggctcaggatgaacgctggcggcgtgcctaacacatgcaagtcgaacgagcgccttcgggtgcgagtggcggacgggtgagtaacgcgtgggtaacctgccttacacagggggacaacagttggaaacgactgctaataccgcataagcccacggaaccgcatggttctgtgagaaaagatttatcggtgtaagatggacccgcgtctgatt

SEQ ID NO: 774 - DNA, 225 bp, Unknown
  Encodes 16S rRNA from Beijerinckia
agagtttgatcatggctcagaacgaacgctggcggcaggcttaacacatgcaagtcgaacggaacatagggtgcttgcactttatgtcagtggcgcacgggtgagtaacgcgtaggaacctgtcttttagcctgggatagcctctggaaacggagggtaaaaccggatgagccctgagggggaaatgagcaatcagctgaaagaggggcctgcgttagattaggc

SEQ ID NO: 775 - DNA, 225 bp, Unknown
  Encodes 16S rRNA from Lactobacillus
agagtttgatcctggctcaggacgaacgctggcggcgtgcctaatacatgcaagtcgaacgaagctttctttcaccgaatgcttgcattcaccgaaagaagcttagtggcgaacgggtgagtaacacgtaggcaacctgcccaaaagagggggataacacttggaaacaggtgctaataccgcataaccatgaacaccgcatgatgttcatgtaaaagacggctt

SEQ ID NO: 776 - DNA, 225 bp, Unknown
  Encodes 16S rRNA from Cryptanaerobacter
agagtttgatcatggctcaggacgaacgctggcggcatgcctaacacatgcaagtcgaacggaataggattggttgtagcgatactttcgatcctatttagtggcgaacgggtgagtaacacgtgagcaacctgccttttacacagggataacagccggaaacggctgctaataccggataagaccacaccgaggcatctcggaggggtcaaagcgatttagcgg

SEQ ID NO: 777 - DNA, 225 bp, Unknown
  Encodes 16S rRNA from Prevotella
agagtttgatcctggctcaggatgaacgctagctacaggcttaacacatgcaagtcgaggggcatcactgggttggcttgccatccctggtggcgaccggcgcacgggtgagtaacgcgtatccaacctgccccgaaccgcggtatagcccgccgaaaggcggattaatcccgcatgtggtcgtgagatgacatctgaccacgactaaaggtattttccggttcg

SEQ ID NO: 778 - DNA, 225 bp, Unknown
  Encodes 16S rRNA from Anaerovibrio
agagtttgatcctggctcaggacgaacgctggcggcgtgcttaacacatgcaagtcgaacggagcgaagaagagcttgctctttggagcttagtggcaaacgggtgagtaacgcgtaggcaacctgcccttcagatggggacaacacctcgaaaggggtgctaataccgaatgacgtgcattggtcgcatgaccgatgcaccaaaggccgggcaaccggtcactg

SEQ ID NO: 779 - DNA, 225 bp, Unknown
  Encodes 16S rRNA from Anaerovorax
agagtttgatcatggctcaggatgaacgctggcggcgtgcctaacacatgcaagtcgagcgggaatctctaaagcagcttgctgcggaagagaggatagcggcggacgggtgagtaacgcgtaggtaagctgccccttgcagaaggatagcctcgggaaactgggattaatacttcataacacggctggtccgcatgaaccggccgtcaaagatttatcggcaag

SEQ ID NO: 780 - DNA, 225 bp, Unknown
  Encodes 16S rRNA from Lachnospiracea incertae sedis
agagtttgatcctggctcaggatgaacgctggcggcgtgcttaacacatgcaagttgaacgaagaagtcagagtgcttgcactcaggcttactgagtggcggacgggtgagtaacgcgtgggtaacctgcctcacacagggggataacagtcggaaacgactgctaataccgcataagcgcacagtgccgcatgacacagtgtgaaaaactccggtggtgtgaga

SEQ ID NO: 781 - DNA, 225 bp, Unknown
  Encodes 16S rRNA from Enterorhabdus
agagtttgatcctggctcaggatgaacgctggcggcgtgcctaacacatgcaagtcgaacggttaaaccgccctcgggcggacataaagtggcgaacgggtgagtaacacgtgaccaacctgccccgcgcaccgggacagccccccgaaagggggattgataccggatactccgccgggcccgcatgggcccggcgggaaagctccggcggcgcgggatggggtc

SEQ ID NO: 782 - DNA, 225 bp, Unknown
  Encodes 16S rRNA from Clostridium XlVb
agagtttgatcctggctcaggatgaacgctggcggcgtgcataacacattcaagtcgaacgggacgttccgagtagcaatatgagggatgtttagtggcggacgggtgagtaacgcgtgagtaacctgcctgtgtgagggggacaacagatcgaaaggcctgctaataccgcatgacgtatggagatcgcatggttttcataccaaagatttatcgcacacagat

SEQ ID NO: 783 - DNA, 225 bp, Unknown
  Encodes 16S rRNA from Selenomonas
agagtttgatcatggctcaggacgaacgctggcggcgtgcttaacacatgcaagtcgaacgaggtgattgaaagcttgcttttgagaaccgagtggcaaacgggtgagtaacgcgtagacaacctgccgcaaagatggggacaacagtccgaaaggactgctaataccgaatgttgtcagattcccgcatgggagactgattaaagatggcctctacttgtaagc

SEQ ID NO: 784 - DNA, 225 bp, Unknown
  Encodes 16S rRNA from Eubacterium
agagtttgatcatggctcaggacgaacgctggcggcgtgcttaacacatgcaagtcgaacgaagcttgatttcagatttcttcggaatgacgaatgatatgactgagtggcggacgggtgagtaacgcgtgagcaacctaccctttggattgggatagcgtttggaaacgaacggtaataccgaataaagtatacggatggcatcatctgtataccaaagctccg

SEQ ID NO: 785 - DNA, 225 bp, Unknown
  Encodes 16S rRNA from Thermotalea
agagtttgatcatggctcaggatgaacgctggcggcgtgcctaacacatgcaagtcgagcgagaagttcgcaacggaagcttcggccgaagatgcggatggacagcggcggacgggtgagtaacgcgtaggtaagctgccctatgcacagggatagcctcgggaaactgggattaatacctgatgaagcggtaggtacacatgtactaatcgccaaagatttatc

SEQ ID NO: 786 - DNA, 225 bp, Unknown
  Encodes 16S rRNA from Enterorhabdus
agagtttgatcctggctcaggatgaacgctggcggcgtgcctaacacatgcaagtcgaacggttaagccggcttcggccgggaatacagtggcgaacgggtgagtaacacgtgaccaacctgccccccgcaccgggacagccccgcgaaagcgcggttaataccggataggcccccgcgcccgcatgggagcggggggaaagcccaggcggcgggggatggggtc

SEQ ID NO: 787 - DNA, 225 bp, Unknown
  Encodes 16S rRNA from Clostridium III
agagtttgatcatggctcaggacgaacgctggcggcgtgcctaacacatgcaagtcgagcgatgatcggaggatgagaccttcgggtggattcttccgagattagcggcggatgggtgagtaacgcgtgggcaatctgccctccacagggggataacacagggaaacttgtgctaataccgcataacatcttcgggaggcatcttctgaagatcaaaggagcgat

SEQ ID NO: 788 - DNA, 225 bp, Unknown
  Encodes 16S rRNA from Acetanaerobacterium
agagtttgatcctggctcaggacgaacgctggcggcgcgcctaacacatgcaagtcgaacggagatgaaaaaagcttgctttaatcatcttagtggcggacgggtgagtaacacgtgagcaacctgcctttcagagggggataacgtttggaaacgaacgctaataccgcataatgtatacggatggcatcgtctgtataccaaaggagcaatccgctgaaagat

SEQ ID NO: 789 - DNA, 225 bp, Unknown
  Encodes 16S rRNA from Treponema
agagtttgatcctggctcagaacgaacgctggcggcgcgtcttaagcatgcaagtcgggcgggattcatgtgcttgcacatgatgagagcggcggactggcgaggagcgcgtgggtgacgcaccccccggacggggacagccggcagaaatgccgggtgataccggatgaggtcccccttgttggaggagggggaggaaaggggcttcggccccgccgggggagc

SEQ ID NO: 790 - DNA, 225 bp, Unknown
  Encodes 16S rRNA from Clostridium XlVa
agagtttgatcatggctcaggatgaacgctggcggcgtgcctaacacatgcaagtcgaacggtgaaaggggacggaaccctccggggggaagtaacctggaacagtggcggacgggtgagtaacgcgtggataacctgcctcatacagggggataacagagagaaatcactgctaataccgcataagcgcacgagggccgcatggcccggtgtgaaaaactccgg

SEQ ID NO: 791 - DNA, 164 bp, Unknown
  Encodes 16S rRNA from Enterorhabdus
agagtttgatcatggctcaggatgaacgctggcggcgtgcctaacacatgcaagtcgaacgaagcacttttgcattcgaggaagacagcgtataaataaatgcgctatttgacgttagagtgtgaataagcaccggcaaactccgtgccagcagccgcggtaat

SEQ ID NO: 792 - DNA, 225 bp, Unknown
  Encodes 16S rRNA from Prevotella
agagtttgatcatggctcaggatgaacgctagctacaggcttaacacatgcaagtcgaggggcagcatgaacttagcttgctaagtttgatggcgaccggcgcacgggtgagtaacgcgtatccaacctgccccgaggtcagggacagcccggcgaaagtcggattaatacctgatggtctctttagatggcatctgacgaggagtaaagattcatcgccttggg

SEQ ID NO: 793 - DNA, 225 bp, Unknown
  Encodes 16S rRNA from Desulfovibrio
agagtttgatcctggctcaggacaaacgctggcggcgtgcctaacacatgcaagtcgaacgagcccttcggggctagtggcagacgggtgagtaacgcgtaggtaatgtacctcttcgctggggataccgttccgaaaggaacgttaataccgaatgaattcatcgggcggcatcgcttgatgaataaaccgcaagggcgaggagatcagcttgcgtactatcag

SEQ ID NO: 794 - DNA, 225 bp, Unknown
  Encodes 16S rRNA from Aminobacter
agagtttgatcatggctcagaacgaacgctggcggcaggcttaacacatgcaagtcgagcgccccgcaaggggagcggcagacgggtgagtaacgcgtgggaatctacccatctctacggaataactcagggaaacttgtgctaataccgtatacgcccttcgggggaaagatttatcggagatggatgagcccgcgttggattagctagttggtggggtaatgg

SEQ ID NO: 795 - DNA, 225 bp, Unknown
  Encodes 16S rRNA from Clostridium IV
agagtttgatcctggctcaggacgaacgctggcggcgtgcctaacacatgcaagtcgaacggagatattcgaatgagattcgttgattttgaatatcttagtggcggacgggtgagtaacgcgtgagtaacctgccgatgagtgtggaataacgttctgaaaagaacgctaataccgcataacatatttttgccgcatgacagaagtatcaaagatttatcgctc

SEQ ID NO: 796 - DNA, 225 bp, Unknown
  Encodes 16S rRNA from Rikenella
agagtttgatcatggctcaggatgaacgctagcggcaggcttaacacatgcaagtcgaggggcagcgcgaggtagcaatactttggcggcgaccggcgcaagggtgcgtaacgcgtgagcaacttgcccgtaacaggaggataaccggaggaaactccgactaatactgcgtagaaataattggtggcatcaccgagtgtttaaaggcgaaagccggttacggat

SEQ ID NO: 797 - DNA, 225 bp, Unknown
  Encodes 16S rRNA from Gordonibacter
agagtttgatcatggctcaggatgaacgctggcggcgtgcctaacacatgcaagtcgaacgattaaaccgccttcgggcggatataaagtggcgaacgggtgagtaacacgtaaccaacctaccccgcacactgggacagcctcgcgaaagcgggattaataccagatactccttatgttacgcatgttttataagggaaagcttttgcggtgcgggatggggtt

SEQ ID NO: 798 - DNA, 225 bp, Unknown
  Encodes 16S rRNA from Papillibacter
agagtttgatcctggctcaggatgaacgctggcggcgtgcataacacattcaagtcgaacgaagcatatggttggaagttttcggacggaagagcatatgacttagtggcggacgggtgagtaacgcgtgagcaaccttcctgcatgtgagggataacacagggaaacttgtgctaataccgcataacgcatgactgtcgcatggcagacatgccaaagaataat

SEQ ID NO: 799 - DNA, 225 bp, Unknown
  Encodes 16S rRNA from Syntrophococcus
agagtttgatcatggctcaggatgaacgctggcggcgtgcctaacacatgcaagtcgaacgaggctcttccctttgaagtttcgacagattagggaagatcaccgagtggcggatgggtgagtaacgcgtggagaacctgcccccatcagggggataacaactggaaacggttgataataccgcatatatgataggaccgcatgattctatcaggaaagatttat

SEQ ID NO: 800 - DNA, 225 bp, Unknown
  Encodes 16S rRNA from Clostridium sensu stricto
agagtttgatcatggctcaggatgaacgctggcggcgtgtttaatacatgcaagtcgaacgaggtatagcaatataccgagtggcgaacgggtgagtaacacgtgagcaacctgccctatacagggggacaacagctggaaacggctgctaataccgcataagaccacagcatcgcatgatgcaggggtaaaaggctacggtcagtataggatgggctcgcgcac

SEQ ID NO: 801 - DNA, 154 bp, Unknown
  Encodes 16S rRNA from Hahella
agagtttgatcatggctcagattgaacgctggcggcaggcttaacacatgcaagtcgtacggtaacagaggaagacagcacgtaaataaacgtgttatttgacgttagagtgtgaataagcaccggcaaactccgtgccagcagccgcggtaat

SEQ ID NO: 802 - DNA, 225 bp, Unknown
  Encodes 16S rRNA from Vampirovibrio
agagtttgatcatggctcaggacgaacgctggcggtgtgcctcatacatgcaagtcgaacgataaggtttcttcggaaatacataagtggcggacgggtgagtacaacataggaaatctgccctaaactgggggacaacagagggaaacttctgctaataccccatacgagctagcttgaaatagctatcttgaaagctccggcggtttaggatgagcctgtgcc

SEQ ID NO: 803 - DNA, 225 bp, Unknown
  Encodes 16S rRNA from Coprococcus
agagtttgatcatggctcaggatgaacgctggcggcgtgcctaacacatgcaagtcgaacggggtgtcaatcttcggaaagacacttagtggcggacgggtgagtaacgcgtgggtaacctgcctcatacagggggatagcagttggaaacgactgataataccgcataagcgcacagtaccgcatggtacagtgtgaaaaactccggtggtatgagatggaccc

SEQ ID NO: 804 - DNA, 225 bp, Unknown
  Encodes 16S rRNA from Coraliomargarita
agagtttgatcatggctcagagtgaacgctggcgacgtggctaagacatgcaagtcgagcgagaaggtgccttcgggtgccggaaagcggcaaacgggtgcgtaacacgtaagtaacctgcccttaagacgggaatagcttgatgaaaattgagataatgcccgatattaaattcttccgcatggaagaggtttgaaaggtttgtgatggcgcttaaggaggggc

SEQ ID NO: 805 - DNA, 225 bp, Unknown
  Encodes 16S rRNA from Clostridium III
agagtttgatcctggctcaggacgaacgctggcggcgtgcctaacacatgcaagtcgagcggagccatcttgaagatcccttcggggtgatttaggggaagcttagcggcggacgggtgagtaacacgtgagtaacctgcccttatgaggaggataacacaccgaaaggtgtgctaatactgcataatatatatttttcgcatggagaatatatcaaagatttat

SEQ ID NO: 806 - DNA, 225 bp, Unknown
  Encodes 16S rRNA from Clostridium XlVa
agagtttgatcatggctcaggatgaacgctggcggcgtgcctaacacatgcaagtcgaacgaagctttgcttatgattttttcggaatgattaagtgaatgactgagtggcggacgggtgagtaacgcgtggataacctgccctttgcagggggataacagccggaaacgactgctaataccgcataagcgcacagcaccgcatggtgcagtgtgaaaaactccg

SEQ ID NO: 807 - DNA, 225 bp, Unknown
  Encodes 16S rRNA from Desulfotomaculum
agagtttgatcctggctcaggacgaacgctggcggcgtgcttaacacatgcaagtcgaacggagcggagcccttcggggccgagcttagtggcggacgggtgagtaacacgtgagcaacctgcccattacagggggatagcagctggaaacggctggtaataccgcataagaccgcggaaccgcatggttcagaggtaaaaggagagatccggtaatggatgggc

SEQ ID NO: 808 - DNA, 225 bp, Unknown
  Encodes 16S rRNA from Helicobacter
agagtttgatcatggctcagagttaacgctggcggcgtgcctaacacatgcaagtcgagcgagtgcttgtaaagactagcggcaaacgggtgagtaacacatgggaaaccttccttagaatgggggacatctccgtgaaaacggagctaataccgcataagaccacagtttggcatcagacaggggtaaaagcagtgatgtgttctaagatggtcctgtgtccta

SEQ ID NO: 809 - DNA, 225 bp, Unknown
  Encodes 16S rRNA from Syntrophococcus
agagtttgatcatggctcaggatgaacgctggcggcgtgcctaacacatgcaagtcgaacgggaacctcatagtggagacttcggtcaaagcagtgagaattctagtggcggatgggtgagtaacgcgtgggtaacctgcctacaagaattggataacagcgagaaattgttgctaatacaatataagcttacagtatcgcatgatacagtgagaaaagatttat

SEQ ID NO: 810 - DNA, 208 bp, Unknown
  Encodes 16S rRNA from Lachnospiracea incertae sedis
agagtttgatcctggctcaggatgaacgctagctacaggcttaacacatgcagcagtggggaatattgcacaatggaggaaactctgatgcagcgacgccgcgtgagcgatgaagtatttcggtatgtaaagctctatcagcagggaagataatgacggtacctgactaagaagctccggctaaatacgtgccagcagccgcggtaat

SEQ ID NO: 811 - DNA, 225 bp, Unknown
  Encodes 16S rRNA from Clostridium IV
agagtttgatcatggctcaggatgaacgctggcggcgtgcttaacacatgcaagtcgaacggagctatattggaaggaccttcggggacggaagatatagcttagtggcggacgggtgagtaacgcgtgagtaacctggcctcaagagggggacaacagctggaaacggctgctaataccgcataacataatggagtcgcatggctctgttatcaaaggagcaat

SEQ ID NO: 812 - DNA, 225 bp, Unknown
  Encodes 16S rRNA from Paludibacter
agagtttgatcatggctcaggatgaacgctagcgacaggcctaacacatgcaagtcgaggggcagcacgagtgaagcttgctttacttggtggcgaccggcgcacgggtgcgtaacgcgtatgcaacctgtccataaccgagggatagcctcccgaaagggagattaaaacttcatgtgccacatgagggcatccgagagtggtaaaacgtttgggttatggttg

SEQ ID NO: 813 - DNA, 225 bp, Unknown
  Encodes 16S rRNA from Lachnospiracea incertae sedis
agagtttgatcatggctcaggatgaacgctggcggcgtgcctaacacatgcaagtcgaacgggactcatagtgacggagatttcggtcaaagaagctttgagtccagtggcggacgggtgagtaacgcgtggggaacctgccctgtaccgggggataacagtgagaaatcactgctaataccgcataagcgcacatggtcgcatgaccgggtgtgaaaagctccg

SEQ ID NO: 814 - DNA, 225 bp, Unknown
  Encodes 16S rRNA from Lachnospiracea incertae sedis
agagtttgatcctggctcaggatgaacgctggcggcgcgcttaacacatgcaagtcgaacgagatgagtggcttcggtcatgaatctagtggcggacgggtgagtaacgcgtggacaacttgccttatagtgggggatagccgaaagaaatttcgattaataccgcataatacaatttggttgcatgatcagattgggaaaggcttcggtcgctaaaagaaaggt

SEQ ID NO: 815 - DNA, 225 bp, Unknown
  Encodes 16S rRNA from Adhaeribacter
agagtttgatcctggctcaggatgaacgctggcggcaggcttaatacatgcaagtcgaacggtaaggtccgaggtagcaataccgaggatacacgagtggcgcacgggtgcgtaacgcgtatgcaacctacctttgactggaacataacgttgagaaatcggcgctaatattccatgtggttatgacccggcatcgggatgtaactaaagatttattggtcaagg

SEQ ID NO: 816 - DNA, 225 bp, Unknown
  Encodes 16S rRNA from Clostridium IV
agagtttgatcatggctcaggatgaacgctggcggcgtgcataacacattcaagtcgaacggacatattgacttcggttggtatgttagtggcggacgggtgagtaacgcgtgagcaacctgcccctatgtgcgggataacggctggaaacggacgctaataccgcataacccaacggaaccgcatgattttgttggcaaagatttattgcatagggatgggctc

SEQ ID NO: 817 - DNA, 225 bp, Unknown
  Encodes 16S rRNA from Cryptanaerobacter
agagtttgatcatggctcaggacgaacgctggcggcgtgcttaatacatgcaagtcgaacggatatgtagcaatacatattagtggcggacgggtgagtaacgcgtaaccaacctgccttttacaggggaataacacttggaaacaggtgctaataccgcatatgaccacaacgcggcatcgcgaaggggtaaaagttttatcggtaaaagagggggttgcgtat

SEQ ID NO: 818 - DNA, 225 bp, Unknown
  Encodes 16S rRNA from Idiomarina
agagtttgatcggccacattgggactgagacacggcccagactcctacgggaggcagcagtggggaatattgcacaatgggggaaaccctgatgcagccatgccgcgtgtgtgaagaaggccttcgggttgtaaagcacttttgcattcgaggaagacagcgtataaataaatgcgctatttgacgttagagtgtgaataagcaccggcaaactccgtgccagca

SEQ ID NO: 819 - DNA, 225 bp, Unknown
  Encodes 16S rRNA from Clostridium IV
agagtttgatcatggctcaggacgaacgctggcggcgtgcttaacacatgcaagtcgaacgaggaatgtttgaaagcttgcttttgaacatttcgagtggcggacgggtgagtaacgcgtgaggaacctgtctttcacagggggataacgttccgaaagggacgctaataccgcatgagaccacggtgccgcatggcacaggggtcaaaggagagatccggtgaa

SEQ ID NO: 820 - DNA, 225 bp, Unknown
  Encodes 16S rRNA from Selenomonas
agagtttgatcctggctcaggacgaacgctggcggcgtgcttaacacatgcaagtcgaacgaggtgattgaaagcttgcttttgagaaccgagtggcaaacgggtgagtaacgcgtagacaacctgccgcaaagatggggacaacagtccgaaaggactgctaataccgaatgttgtcagtttctcgcatgagagactgattaaagatggcctctacttgtaagc

SEQ ID NO: 821 - DNA, 225 bp, Unknown
  Encodes 16S rRNA from Acetanaerobacterium
agagtttgatcctggctcaggataaacgctggcggcgtgcataacacattcaagtcgaacgaagcacttcggaacgagacttcggtcaagggaagatttgacttagtggcggacgggtgagtaacgcgtgagcaatctgcctcggggtgcgggataacgtttggaaacgaacgctaataccgcatgacgcatacctttcgcatgtgaggtatgccaaaggtttac

SEQ ID NO: 822 - DNA, 225 bp, Unknown
  Encodes 16S rRNA from Bifidobacterium
agagtttgatcatggctcaggatgaacgctggcggcgtgcttaacacatgcaagtcgaacgggatcggctggagcttgctccggccgtgagagtggcgaacgggtgagtaatgcgtgaccgacctgccccgtacaccggaatagctcctggaaacgggtggtaatgccggatgctccaatgcgatgcatgtcgcgttgggaaagatttcatcggtatgggatggg

SEQ ID NO: 823 - DNA, 225 bp, Unknown
  Encodes 16S rRNA from Clostridium XlVb
agagtttgatcatggctcaggatgaacgctggcggcgtgcctaacacatgcaagtcgagcgaagaatgagaagcttgcttttcattacttagcggcggacgggtgagtaacgcgtgggtaacctgccctgtacaggggaataacagttagaaatgactgctaatgccccataagccgacgtaatggcatctttatgtcggaaaagatttatcggtacaggaggga

SEQ ID NO: 824 - DNA, 225 bp, Unknown
  Encodes 16S rRNA from Asaccharobacter
agagtttgatcatggctcaggatgaacgctggcggcgtgcttaacacatgcaagtcgaacgattaaaccggcttcggccggatatagagtggcgaacgggtgagtaacacgtgaccaacctaccccatactccgggataactcagggaaacttgtgctaataccggatactccgagaggatcgcatgttcttttcgggaaagcctttacggtatgggatggggtc

SEQ ID NO: 825 - DNA, 225 bp, Unknown
  Encodes 16S rRNA from Eubacterium
agagtttgatcctggctcaggatgaacgctggcggcgtgcttaacacatgcaagtcgaacggaactcactttctgaagttttcggatggatgaaggtaagtttagtggcggacgggtgagtaacgcgtgggtaacctgccctgtacagggggataacagttagaaatgactgttaataccgcataagaccacagcaccgcatggtgcaggggtaaaagctccgac

SEQ ID NO: 826 - DNA, 225 bp, Unknown
  Encodes 16S rRNA from Anaeroplasma
agagtttgatcctggctcaggattaacgctggcggcgtgcctaatacatgcaagtcgaatggtagtagcaatacaaaccatggcgaacgggtgagtaacacgtaggtaacctgtctttaagacgaggataaccattggaaacgatggataatactggataggacatcataaagggcatccttagatgtttaaagattattatgtcacttagagaggggcctgcgg

SEQ ID NO: 827 - DNA, 225 bp, Unknown
  Encodes 16S rRNA from Saccharofermentans
agagtttgatcatggctcaggacgaacgctggcggcgtgcctaacacatgcaagtcgagcggagtaagtggagagcttgcttgaaacttacttagcggcggacgggtgagtaacgcgtgagcaacctgtcctctgcagggggataagacagcgaaagttgttctaataccgcataagaccacaacgtcacatggcgaaggggtcaaaggaggaatccggcagagg

SEQ ID NO: 828 - DNA, 225 bp, Unknown
  Encodes 16S rRNA from Ruminococcus
agagtttgatcatggctcaggacgaacgctggcggcacgcctaacacatgcaagtcgaacggtgtcggaggtgcttgcaccaatgacatagtggcggacgggtgagtaacacgtgagcaacctgccttcaagaaagggatagcttctggaaacggatggtaataccttataatatatactggccgcatgaccggtgtatcaaacgaattttgcttgaagatgggc

SEQ ID NO: 829 - DNA, 225 bp, Unknown
  Encodes 16S rRNA from Clostridium III
agagtttgatcctggctcaggacgaacgctggcggcgtgcctaacacatgcaagtcgagcggaggaaaccgaaagaagccttcgggtggattttggtggacttagcggcggacgggtgagtaacgcgtgagtaacctgcccataagagggggataatccttggaaacggggactaataccgcatatagagtatttgttgcatgattgatacttgaaagatttatc

SEQ ID NO: 830 - DNA, 225 bp, Unknown
  Encodes 16S rRNA from Acholeplasma
agagtttgatcatggctcaggattaacgctggcggcatgcctaatacatgcaagtcgaacggtctagcttgctagacagtggcgaacgggtgagtaacacgtaggtaatccacccttaggacgaggatagcttctggaaacggaaggtaaaactggatagtatatagggaggcatcttcttatatttaaaagagcaatctacctaaggaagagcctgcggcgcat

SEQ ID NO: 831 - DNA, 225 bp, Unknown
  Encodes 16S rRNA from Pedobacter
agagtttgatcctggctcaggatgaacgctagcggcaggcttaacacatgcaagtcgaggggcagcgggccgtagcaatacggtgccggcgaccggcggacgggtgcgtaacgcgtatgcaaccttccctgcacaggggtatagcccggcgaaagccggaataatcccccatagtttcaattttccgcatggagagttggataaacgggcgaccgggtgcaggat

SEQ ID NO: 832 - DNA, 225 bp, Unknown
  Encodes 16S rRNA from Sphingomonas
agagtttgatcatggctcagagcgaacgctagcggcatgctttatacatgcaagtcgaacgaacgagtttatattgagtagcaatacgatttatgaatgagttagtggcgaacgggtgagtaatatataggaatttgcccagtagtgggggacaacagttagaaatgactgctaataccgcatacgcccgagaggggaaagatttatcgctattggagaagccta

SEQ ID NO: 833 - DNA, 225 bp, Unknown
  Encodes 16S rRNA from unknown taxa
agagtttgatcctggctcagaacgaacgctggtagcgtggattaggcatgcaagtcgaacgggatccgggaggtagcaatacttcctggtgagagtggcggattggggaggaacacgtgagcaacctgccttggagtcggggaaaaccgttggaaacgacggctaataccggatgtggcgcccggtgacatcatcggagcgctaaagggggccgcaaggctctcg

SEQ ID NO: 834 - DNA, 225 bp, Unknown
  Encodes 16S rRNA from Anaerovorax
agagtttgatcatggctcaggatgaacgctggcggcgtgcctaacacatgcaagtcgagcgggaaatcctcaaaggaagcttcggcagactgagaggatggatagcggcggacgggtgagtaacgcgtaggtaagctgccccatgcacagggatagcctcgggaaactgggattaatacctgatgacaccgcgcattcacatggatatgcggtcaaagatttatc

SEQ ID NO: 835 - DNA, 225 bp, Unknown
  Encodes 16S rRNA from Spirochaeta
agagtttgatcatggctcagaacgaacgctggcggtgcgtcttaagcatgcaagtcggacggcaagatagtagcttgctactatcctagagtggcggactggtgagtaacacgtgggtgacataccctttggctggggatagccggtagaaataccgggtaataccgaataagattctgcaggttagagtggcagaaagaaaggagcttcggcttcaccgaagga

SEQ ID NO: 836 - DNA, 225 bp, Unknown
  Encodes 16S rRNA from Paraeggerthella
agagtttgatcctggctcaggatgaacgctggcggcgtgcctaacacatgcaagtcgaacggttaaggcgccttcgggcgcgaatagagtggcgaacgggtgagtaacacgtgaccaacctgccccgcgctccgggacagcctcgggaaaccgggattaataccggatgcgccggggggcgcgcatgcgccccccgggaaagcccaggcggcgcgggatggggtc

SEQ ID NO: 837 - DNA, 225 bp, Unknown
  Encodes 16S rRNA from Lachnospiracea incertae sedis
agagtttgatcctggctcaggatgaacgctggcggcgcgcctaacacatgcaagtcgaacgaaatgagtagcttcggttacaagtttagtggcggacgggtgagtaacgcgtggataatttgcctttcagtgggggatagctgagagaaatctcaattaataccgcataacataatttattcgcatgagtgagttattaaagatgcaagtcgctggaagagaagt

SEQ ID NO: 838 - DNA, 225 bp, Unknown
  Encodes 16S rRNA from Bacteroides
agagtttgatcctggctcaggatgaacgctagctacaggcttaacacatgcaagtcgaggggcagcattgaggttgcttgcaacttcagatggcgaccggcgaatgggtgagtaacgcgtatccaacctgccgtgtgctctgggatagcccttagaaatgaggattaatacgagatagtctcctttgatcgcctgagattaggagtaaagattcatcggcacacg

SEQ ID NO: 839 - DNA, 225 bp, Unknown
  Encodes 16S rRNA from Paenibacillus
agagtttgatcatggctcaggatgaacgctggcggcgtgcctaatacatgcaagtcgaacggactgtagcaatacagttagtggcgaacgggtgagtaacacgtaggtaacctgccctcaagactgggatacccagacgaaagtttggctaataccggataacaactctggaggcatctctggagtttgaaaggcgcctttaaagcgccacttaaggatggacct

SEQ ID NO: 840 - DNA, 225 bp, Unknown
  Encodes 16S rRNA from Prevotella
agagtttgatcctggctcaggatgaacgctagctacaggcttaacacatgcaagtcgaggggcagcatgaagattgcttgcaatctttgatggcgaccggcgcacgggtgcgtaacgcgtatcgaacctgccctgtacacggggatagccttgcgaaagcaagattaatacccgatgttttggcgatgccgcatgacattaccaacaaagatttatcggtacagg

SEQ ID NO: 841 - DNA, 225 bp, Unknown
  Encodes 16S rRNA from Bacteroides
agagtttgatcatggctcaggatgaacgctagctacaggcttaacacatgcaagtcgaggggcagcatgaacttagcttgctaagtttgatggcgaccggcgcacgggtgagtaacgcgtatccaaccttccgtttactcggggatagcctttcgaaagaaagattaatacccgatggtatggtaatattgcatgataataccattaaagattaattggtaaacg

SEQ ID NO: 842 - DNA, 225 bp, Unknown
  Encodes 16S rRNA from Clostridium XlVa
agagtttgatcctggctcaggatgaacgctggcggcgtgcttaacacatgcaagtcgaacgaagcatcccttgaaattttcggatggatggggatgacttagtggcggacgggtgagtaacgcgtgggtaacctgcctcatgcagggggacaacagctggaaacggctgctaataccgcataagaccccgtgagcgcatgctcaagaggtaaaagatttatcggc

SEQ ID NO: 843 - DNA, 225 bp, Unknown
  Encodes 16S rRNA from Clostridium XlVa
agagtttgatcatggctcaggatgaacgctggcggcgtgcttaatacatgcaagtcgaacgggatagattgggagcttgctcttgatttatctagtggcggacgggtgagtaacgcgtgggtaacctgcctcatacagggggataacagttagaaatgactgctaaaaccgcataacattatggtaccgcatgatatcatgatcaaatatttataggtatgagat

SEQ ID NO: 844 - DNA, 225 bp, Unknown
  Encodes 16S rRNA from Roseburia
agagtttgatcctggctcaggatgaacgctggcggcgtgcttaacacatgcaagtcgaacgaggtttaagcggaagcccttcgggacggaagcttttaccgagtggcggacgggtgagtaacgcgtgggtaacctgccctgtactgggggacaacagttggaaacgactgctaataccgcataagcgcacgagatcgcatggttttgtgtgaaaaactccggtgg

SEQ ID NO: 845 - DNA, 225 bp, Unknown
  Encodes 16S rRNA from Clostridium XlVa
agagtttgatcatggctcaggatgaacgctggcggcgtgcctaacacatgcaagtcgaacggggtacagacgctgtgagaagaagtgcttgcacggaatcaaacttgtttgtacttagtggcggacgggtgagtaacgcgtggaaaacctgcctcatacagggggataacaggaagaaattcctgctaataccgcataagcgcacaaggtcgcatgatcaggtgt

SEQ ID NO: 846 - DNA, 225 bp, Unknown
  Encodes 16S rRNA from Clostridium III
agagtttgatcatggctcaggacgaacgctggcggcgtgcctaacacatgcaagtcgaacggggaagagaagcttgcttttctttctagtggcggacgggtgagtaacgcgtgagcaacctacctatcagtgggggataacgtctggaaacagacgctaataccgcatatcgtacataattcgcatgaataagtgtatgaaaggagtaatttgctggtagatggg

SEQ ID NO: 847 - DNA, 225 bp, Unknown
  Encodes 16S rRNA from Pedobacter
agagtttgatcctggctcaggatgaacgctagcggcaggcctaatacatgcaagtcgaacggtaaacgccccttcgggggtgtgagagtggcgcacgggtgcgtaacgcgtatgcaacccacccgctgccgggggatagcccggagaaatccgaattaataccccatgaggaggaggtgaggcatctcatctttttcaaaacttcggtggcggcggacgggcatg

SEQ ID NO: 848 - DNA, 225 bp, Unknown
  Encodes 16S rRNA from Robinsoniella
agagtttgatcatggctcaggatgaacgctggcggcacgcttaacacatgcaagtcgagcggagaacagacttcggtttgttcttagcggcggacgggtgaggaacgcgtgggtaatctgccctatacaggggaataacactgagaaattagtgataaagccgcataagcccacgggatcgcatgatcctgcgggaaaaactccggtggtataggatgagcccgc

SEQ ID NO: 849 - DNA, 225 bp, Unknown
  Encodes 16S rRNA from Anaeroplasma
agagtttgatcctggctcaggattaacgctggcggcatgcctaatacatgcaagtcgaacggaactagcttgctagttcagtggcgaacgggtgagtaacacgtaggtaatctacctttaggacgaggatagcttctggaaacggaaggtaaaactggatagtatattagagggcatcctttaatatttaaaagagcaatctacctagagaggagcctgcggccc

SEQ ID NO: 850 - DNA, 225 bp, Unknown
  Encodes 16S rRNA from Clostridium XlVa
agagtttgatcctggctcaggatgaacgctggcggcgtgcctaacacatgcaagtcgaacggagtgcattaagcagattcttcggatgaagctttttacacttagtggcggacgggtgagtaacgcgtggagaacctgcctcacacagggggacagcagctggaaacggctgataataccgcatatgcccacgataccgcatggtattgcggggaaacatttatg

SEQ ID NO: 851 - DNA, 225 bp, Unknown
  Encodes 16S rRNA from Hydrogenoanaerobacterium
agagtttgatcatggctcaggacgaacgctggcggcgcgcttaacacatgcaagtcgtacgaaatcagcaatggtttagtggcggacgggtgagtataacatgaataacttgcctcagagtgggggatagcttctggaaacagaagataataccgcatatttcgaatttttctcatgaatttttcggtaaagaagctttttcgctctgagatgggttcatgcccg

SEQ ID NO: 852 - DNA, 225 bp, Unknown
  Encodes 16S rRNA from Turicibacter
agagtttgatcatggctcaggatgaacgctggcggcgtgcctaatacatgcaagtcgaacgaggttggtagcaatatcaaccgagtggcgaacgggtgagtaacacgtagggaacctgccctttagtttgggatacccagaggaaactttggctaataccggataattgttctggaggcatctccggaatctgaaaggggcctttaaagcctcgcttaaggatgg

SEQ ID NO: 853 - DNA, 225 bp, Unknown
  Encodes 16S rRNA from Papillibacter
agagtttgatcatggctcaggataaacgctggcggcgtgcttaacacattcaagtcgaacggacggaggggagcttgctcccccgagttagtggcggacgggtgagtaacgcgtgagcaacctgccttttttcgggggataacacggggaaaccggtgctaataccgcataaagtaccgacatcgcatggtgatggtaccaaaggagcaatccgaggaaagatgg

SEQ ID NO: 854 - DNA, 225 bp, Unknown
  Encodes 16S rRNA from Clostridium XlVa
agagtttgatcctggctcaggatgaacgctggcggcgtgcctaacacatgcaagtcgagcggacttatgataagattcttcggatgatttttataagttagcggcggatgggtgaggaacgcgtggagaacctgcccttcacagggggataacagctggaaacggctgttaataccgcatatgctcacggtggcgcatgtcacagggaggaaagctccggcggtg

SEQ ID NO: 855 - DNA, 225 bp, Unknown
  Encodes 16S rRNA from Saccharofermentans
agagtttgatcatggctcaggacgaacgctggcggcgtgcctaacacatgcaagtcgagcgaggacaagggcttcggttcttgttcgagcggcggacgggtgagtaacgcgtgaacaatctgtccctgacaggggaataacacttggaaacaggtgctaataccgcataagaccacgggttcgcatgaaccaggggtaaaaggagagatccggtgaggggtgagt

SEQ ID NO: 856 - DNA, 225 bp, Unknown
  Encodes 16S rRNA from Clostridium XlVb
agagtttgatcatggctcaggatgaacgctggcggcgtgcctaacacatgcaagtcgagcgaagttttagggaagcttgctttccgaagaacttagcggcggacgggtgagtaacgtgtgggtaacttgccctatgcagagggataacagtgagaaatcactgctaatacctcataagctcacaccttcacatggaggagtgagaaaagatttatcggcatagga

SEQ ID NO: 857 - DNA, 225 bp, Unknown
  Encodes 16S rRNA from Sporobacter
agagtttgatcctggctcaggatgaacgctggcggcgtgcctaacacattcaagtcgaacggagaagggagcttcggctcccggatcagtggcggacgggtgagtaacgcgtgagcaacctgccttcgtgtggggaataacacagggaaacttgtgctaataccgcataatgcaaagacatagcattgtgactttgccaaagatttattgcatgaagatgggctc

SEQ ID NO: 858 - DNA, 225 bp, Unknown
  Encodes 16S rRNA from Asaccharobacter
agagtttgatcatggctcaggatgaacgctggcggcgtgcttaacacatgcaagtcgaacgagaaagcaccttcgggtgtaagtagagtggcgaacgggtgagtaacacgtgagcaacctgcctctcactttggaataactcagagaaatttgagctaataccgaatacttcgtatctttcgcatgatcgatacgagaaagccttgtgcggtgagagatgggctc

SEQ ID NO: 859 - DNA, 225 bp, Unknown
  Encodes 16S rRNA from Bacteroides
agagtttgatcatggctcaggatgaacgctagctacaggcttaacacatgcaagtcgaggggcagcattaggtcagcttgctgatttagatggcgaccggcgcacgggtgagtaacgcgtatccaacctgccccctacccggggatagccttgcgaaagtaagattaatacccggtgctgttgcgatcccgcatggggatgcaacgaaagattcatcggtagggg

SEQ ID NO: 860 - DNA, 225 bp, Unknown
  Encodes 16S rRNA from Anaeroplasma
agagtttgatcatggctcaggattaacgctggcggcatgcctaatacatgcaagtcgaatgggaagcttgctttccatggcgaacgggtgagtaacacgtaggtaagccatacatcagacgaggataacctttggaaacgaaggataatactggataggatatttgatcgcatgattaaatatttaaagatttatcactgatggaagcacctgcggcgcattagc

SEQ ID NO: 861 - DNA, 225 bp, Unknown
  Encodes 16S rRNA from Sporobacter
agagtttgatcctggctcaggacgaacgctggcggcgtgcctaacacatgcaagtcgaacgagaattcccggaaggagacttcggtcaacggaagggaaggacagtggcggacgggtgagtaacgcgtgagcaacctgcccttcggagggggacaacagctggaaacggctgctaataccgcataacgtatcacacaggcatctgagagataccaaagatttatc

SEQ ID NO: 862 - DNA, 225 bp, Unknown
  Encodes 16S rRNA from Streptomyces
agagtttgatcctggctcaggacgaacgctggcggcgtgcttaacacatgcaagtcgaacgatgaagccgcttcggtggtggattagtggcgaacgggtgagtaacacgtgggcaatctgccctgcactctgggataagccctggaaacggggtctaataccggatgggactgctgggggcatcctctggtggtggaaagcttcggtggtgcaggatgagcccgc

SEQ ID NO: 863 - DNA, 225 bp, Unknown
  Encodes 16S rRNA from Arcobacter
agagtttgatcctggctcagagtgaacgctggcggcgtgcttaacacatgcaagtcgaacgagaacggattatagcttgctataattgtcagctaagtggcgcacgggtgagtaatgtataggtaatatgcctcttactaagggataacaattggaaacgattgctaataccttatattcctttttatcaaaagataaaaagggaaagatttattggtaagagat

SEQ ID NO: 864 - DNA, 225 bp, Unknown
  Encodes 16S rRNA from Clostridium XlVa
agagtttgatcctggctcaggatgaacgctggcggcgtgcctaacacatgcaagtcgaacggacccatggaaatgattagcttgctatgaaattccggaaggttagtggcggacgggtgagtaacgcgtgggcaacctgccctgtactgggggatagcagctggaaacggctggtaataccgcataagcgcacagtaccgcatggtacagtgtgaaaagctccga

SEQ ID NO: 865 - DNA, 225 bp, Unknown
  Encodes 16S rRNA from Barnesiella
agagtttgatcatggctcaggatgaacgctagcgacaggcctaacacatgcaagtcgaggggcagcgggagcaaagcttgctttgcttgccggcgaccggcgcacgggtgagtaacgcgtatgcaacctgcctgtaacagggggataacccggagaaatccggcctaacaccgcataacacatgtaagccgcatggttttcatgtcaaatattcgtaggttacag

SEQ ID NO: 866 - DNA, 225 bp, Unknown
  Encodes 16S rRNA from Lactobacillus
agagtttgatcatggctcaggacgaacgctggcggcgtgcctaatacatgcaagtcgagcgagcggaaccaacagatttacttcggtaatgacgttgggaaagcgagcggcggatgggtgagtaacacgtggggaacctgcccctaagtctgggataccatttggaaacaggtgctaataccggataagaaagcagatcgcatgatcagcttttaaaaggcggcg

SEQ ID NO: 867 - DNA, 225 bp, Unknown
  Encodes 16S rRNA from Flavobacterium
agagtttgatcatggctcaggatgaacgctagcggcaggcttaacacatgcaagtcgaggggtaacaggcggtagcaatactgtgctgacgaccggcgcacgggtgcgtaacgcgtatgcaacctgcccgcgacagggggataacggagggaaacttccactaatatcccatggtgccgaggtctcgcatggggtttcggctaaaggggcgacccggttgcggat

SEQ ID NO: 868 - DNA, 225 bp, Unknown
  Encodes 16S rRNA from Victivallis
agagtttgatcatggctcagaatgaacgctggcggcatggattaggcatgcaagtcgaacgccccgggcttgcccggggagtggcgaaagggtgcgcaacacgtgaggaacccgcccccgggtccgggacaagcgctggaaacggcgtctaataccggatgccgaccggaatcgcatgattccgcgtcgaaagtcttctcgcccggggaaggcctcgcgtcccat

SEQ ID NO: 869 - DNA, 225 bp, Unknown
  Encodes 16S rRNA from Clostridium XlVa
agagtttgatcctggctcaggatgaacgctggcggcgtgcctaacacatgcaagtcgaacgatgaaatacggagacgagttttcggacgagaggaagtatggaatagtggcggacgggtgagtaacgcgtggataatctgccccatacagggggatagcagttggaaacgactgataacaccgcataagcgcacggagaggcatctctttgtgtgaaaatctacg

SEQ ID NO: 870 - DNA, 225 bp, Unknown
  Encodes 16S rRNA from Ureaplasma
agagtttgatcctggctcaggattaacgctggcaccatgcctaatacatgcatgtcgagcggagtttagagagcttgctttctaaacttagcggcaaatgggtgagtaacacgtaaggaacctgcctaagcgacgaggacaacggttggaaacgactgctaatactggatagtataagaaaccgcatgatttcttatttaaaggtccgtttggaccacgcttaga

SEQ ID NO: 871 - DNA, 225 bp, Unknown
  Encodes 16S rRNA from Acetanaerobacterium
agagtttgatcatggctcaggatgaacgctggcggcgcgcctaacacatgcaagtcgaacggacgaagctcttcggagccaagttagtggcgaacgggtgagtaacacgtgaggaacctgcctttcagagggggataacacttagaaataggtgctaataccgcataagaccacagagcggcatcgctcaggggtcaaaggagcaatccgctgaaagatggcctc

SEQ ID NO: 872 - DNA, 225 bp, Unknown
  Encodes 16S rRNA from Slackia
agagtttgatcatggctcaggatgaacgctggcggcgtgcctaacacatgcaagtcgaacgattaaagcccctccgggggtgcatagagtggcgaacgggtgagtaacacgtgaccaacccgccccggacaccgggacaacgggcggaaacgcctgctaataccggatactccgcgacggacgcatgtccgacgcgggaaagcccaggcggtccgggatggggtc

SEQ ID NO: 873 - DNA, 225 bp, Unknown
  Encodes 16S rRNA from Lachnospiracea incertae sedis
agagtttgatcctggctcaggatgaacgctggcggcgtgcctaacacatgcaagtcgagcggagataagcaccggatgaagatttatcggattccaccgcttatcttagcggcggatgggtgagtaacgcgtggataacctgccccttgcagggggataacaaccggaaacgggtgctaataccgcataggcgcgtaggaccgcatggtcctaagcgtaaagatt

SEQ ID NO: 874 - DNA, 225 bp, Unknown
  Encodes 16S rRNA from Oscillibacter
agagtttgatcctggctcaggacaaacgctggcggcgtgcctaacacatgcaagtcgaacggagcttatcaccttcgggaggtaagcttagtggcggactggtgagtaacgcgtgagcaacctgcccttcagtgggggacaacagctggaaacggctgctaataccgcatgacgttagatgaaggcatcttcgtttaactaaagatttattgctgaaggatgggc

SEQ ID NO: 875 - DNA, 225 bp, Unknown
  Encodes 16S rRNA from Prevotella
agagtttgatcatggctcaggatgaacgctagcgacaggcctaacacatgcaagtcgaggggcagcatggtcttagcttgctaagactgatggcgaccggcgcacgggtgagtaacgcgtatgcaacctttccgcgtccccgggacagtcggccgaaaggccgcgtaacaccgggcgttccgtttgaggggcatcccttgggcggaatacgcgagggtcgcgggt

SEQ ID NO: 876 - DNA, 225 bp, Unknown
  Encodes 16S rRNA from Proteiniphilum
agagtttgatcatggctcaggatgaacgctagcggcaggcctaacacatgcaagtcgaggggcagcgggaggtagcaataccttgccggcgaccggcgcacgggtgcgtaacgcgtatgcaacctaccttcaacagggggataacccagagaaatccggactaataccccgtatagtagcgagaccgcatgatcttgctacgaaagcttcggtggttggagatgg

SEQ ID NO: 877 - DNA, 225 bp, Unknown
  Encodes 16S rRNA from Spirochaeta
agagtttgatcatggctcagaacgaacgctggcggcgcgtcttaagcatgcaagtcgagcgggaaacagtagcttgctactgttgagagcggcggactggtgagtaacgcgtgggtgacgtaccctctggatggggatagctcctagaaataggaggtaataccgaatacgatgcacgggaacagaggccgtgcatgaaagtatcttttgatacgccggaggagc

SEQ ID NO: 878 - DNA, 225 bp, Unknown
  Encodes 16S rRNA from Ruminococcus
agagtttgatcatggctcaggacgaacgctggcggcacgcctaacacatgcaagtcgaacggtgaatgaatagcttgctagacattcatagtggcggacgggtgagtaacacgtgagcaacctgcctctgagagagggatagcttctggaaacggatggtaatacctcatgatatagcgttctcgcatgggaatgctatcaaacgaaattcgctcagagatgggc

SEQ ID NO: 879 - DNA, 225 bp, Unknown
  Encodes 16S rRNA from Prevotella
agagtttgatcctggctcaggatgaacgctagctacaggcttaacacatgcaagtcgaggggcatcgggagggaagcttgctttccttgccggcgaccggcgcacgggtgagtaacgcgtatccaacctgccgcacagtaggggatagcccggagaaatccggattaataccctatgttctccgagtcagtcatctgaattggagcaaaggttcgccgctgtgcg

SEQ ID NO: 880 - DNA, 225 bp, Unknown
  Encodes 16S rRNA from Butyricicoccus
agagtttgatcctggctcaggataaacgctggcggcgcacataagacatgcaagtcgaacgggaactttattgaagtttactgatataaagttctagtggcggactggtgagtaatgtataagcaacctgcctataagaggggaataacagtgagaaatcattgctaataccgcataagctgtgagaatggcatcattcaaacagaaaaggaagcaattccgctt

SEQ ID NO: 881 - DNA, 225 bp, Unknown
  Encodes 16S rRNA from Devosia
agagtttgatcatggctcagaacgaacgctggcggcaggcttaacacatgcaagtcaagggggtgtagcaatacacaaccggcgcacgggtgagtaacgcgtgggaatatgtccatttgtggggaatagcttctggaaacggaaggtaataccgcatacgccctacgggggaaagatttatcgcagatggagtggcccgcgttggattagctagttggttgggta

SEQ ID NO: 882 - DNA, 225 bp, Unknown
  Encodes 16S rRNA from Anaeroplasma
agagtttgatcatggctcaggattaacgctggcggcgtgcctaatacatgcaagtcggatggttagcttgctaaccatggcgaacgggtgagtaacacgtaggtaacctgtcttaaagacgaggataaccattggaaacgatggataatactggataggatatataagggcatcctgatatatttaaagatttatcactttatgaggggcctgcggcgcattagt

SEQ ID NO: 883 - DNA, 225 bp, Unknown
  Encodes 16S rRNA from Oscillibacter
agagtttgatcatggctcaggacgaacgctggcggcgtgcctaacacatgcaagtcgaacgaagctccgaaagcaacggtttcggccggagtggacggatgacttagtggcggacgggtgagtaacgcgtgagcaacctgcccttcagagggggacaacagttggaaacgactgctaataccgcataacgtaaggaaatggcatcatattcttaccaaagattta

SEQ ID NO: 884 - DNA, 225 bp, Unknown
  Encodes 16S rRNA from Barnesiella
agagtttgatcatggctcaggatgaacgctagcgacaggcctaacacatgcaagtcgagggtgaagtttgaagtagcttgctacggataatggaaaccggcgcacgggtgcgtaacaggtatgcaatctatcctaagccgggggatagcccactgaaaagtggattaatactccatgtgccacgagggggcatccttttgtggtgaaacgtgagggcataggttg

SEQ ID NO: 885 - DNA, 225 bp, Unknown
  Encodes 16S rRNA from Atopobium
agagtttgatcatggctcaggatgaacgctggcggcgcgcttaacacatgcaagtcgaacggttaaagcccttcggggtgaataaagtggcgaacggctgagtaacacgtgggcaacctacccctcacattgggatagcctcgggaaaccgggagtaataccgaatactccggacatctcgcatgggatgaccgggaaagctccggcggtgagggatgggcccgc

SEQ ID NO: 886 - DNA, 225 bp, Unknown
  Encodes 16S rRNA from Clostridium XlVa
agagtttgatcatggctcaggatgaacgctggcggcgcgcataacacatgcaagtcgaacggagtcacattgaaacctagtgatttgtgacttagtggcggacgggtgagtaacgcgtgggtaacctgcctggtattgggggacaacagttagaaatgactgctaataccgcatacgacgtcggggaggcatctccctgacgggaaaggaattatccgatatcag

SEQ ID NO: 887 - DNA, 225 bp, Unknown
  Encodes 16S rRNA from Methanobrevibacter
agagtttgatcctggcagatgctactgctattgggattcgattaagccatgcaagtcgaacgagtttaggctcgtggcgtacggctcagtaacacgtggataacctacccttaggactgggataaccctgggaaactggggataataccggataggcaatttttcctgtaatggttttttgtttaaatgttttttcgcctaaggatgggtctgcggccgattagg

SEQ ID NO: 888 - DNA, 225 bp, Unknown
  Encodes 16S rRNA from Butyricimonas
agagtttgatcatggctcaggatgaacgctagcggcaggcttaacacatgcaagtcgaggggcagcgcgtcgtagcaatacgatggcggcgaccggcggaagggtgcgtaacgcgtgagcaacttgcccgtcactgtgggataggcactggaaacggtgtgtaataccacgtaacactacgagctgcatggtttgtagttgaaagattcattggtgacggatagg

SEQ ID NO: 889 - DNA, 225 bp, Unknown
  Encodes 16S rRNA from Butyricimonas
agagtttgatcctggctcaggatgaacgctagcggcaggcttaacacatgcaagtcgaggggcagcgcgttgtagcaatacgatggcggcgaccggcgcaagggtgcgtaacgcgtgagcaacatgcccgcaacagggggataaccggaggaaactccgactaataccccataaggacgtaggacggcatcgtccagcatctaaacttacgagggttgcggattg

SEQ ID NO: 890 - DNA, 225 bp, Unknown
  Encodes 16S rRNA from Asaccharobacter
agagtttgatcatggctcaggatgaacgctggcggcgtgcctaacacatgcaagtcgaacggttaaaccggcttcggccggatatagagtggcgaacgggtgagtaacacgtgaccaacctgccccccgctccgggataacccagggaaacctgcgctaataccggatactccgcccgggccgcatggcccgggcgggaaagcccagacggcgggggatggggtc

SEQ ID NO: 891 - DNA, 225 bp, Unknown
  Encodes 16S rRNA from Enhydrobacter
agagtttgatcatggctcagattgaacgctggcggcaggcttaacacatgcaagtcgaacgatgaaactctagcttgctagagatgattagtggcggacgggtgagtaacatttaggaatctgcctagtagtgggggatagctcggggaaactcgaattaataccgcatacgacctacgggtgaaagggggcgcaagctcttgctattagatgagcctaaatcag

SEQ ID NO: 892 - DNA, 225 bp, Unknown
  Encodes 16S rRNA from Treponema
agagtttgatcatggctcagaatgaacgctggcggcgggtcttaagcatgcaagtcggacggcaagaaagtgcttgcactttcctagagtggcggactggtgaggaacacgttggtgacgtaccctttggatggggatagccggtagaaataccgggtaataccgaataaggtcggtggtcttggaagccaccgaggaaagcggctttggccgcgccgaaggaac

SEQ ID NO: 893 - DNA, 225 bp, Unknown
  Encodes 16S rRNA from Clostridium XlVa
agagtttgatcatggctcaggatgaacgctggcggcgtgcttaacacatgcaagtcgaacgaagcatgagtgatgagtaatctgatctcatgacttagtggcggacgggtgagtaacgcgtgggtaacctacctcacacagggggataacagttggaaacgactgctaaaaccgcataacatggcgataccgcatgacattgccatcaaatatttataggtgtga

SEQ ID NO: 894 - DNA, 225 bp, Unknown
  Encodes 16S rRNA from Adlercreutzia
agagtttgatcctggctcaggatgaacgctggcggcgtgcttaacacatgcaagtcgaacgattaacccatcttcggatggttataaagtggcgaacgggtgagtaacacgtgaccaacctgcctttcacattgggataactaagggaaactgtagctaataccaaatactccggcacctccgcatggtagtgccgggaaagctccggcggtgaaagatggggtc

SEQ ID NO: 895 - DNA, 225 bp, Unknown
  Encodes 16S rRNA from Prevotella
agagtttgatcctggctcaggatgaacgctagctacaggcttaacacatgcaagtcgcggggcagcgggagagaagcttgcttttcttgccggcgaccggcgcacgggtgcgtaacgcgtatcgaacctgccccagtcagggggacagccctctgaaaggaggattaataccccatggttccctgtgtccgcatggacgttgggataaaggagagattcggactg

SEQ ID NO: 896 - DNA, 225 bp, Unknown
  Encodes 16S rRNA from Pseudoflavonifractor
agagtttgatcatggctcaggatgaacgctggcggcgcgcctaacacatgcaagtcgaacggtgaagtcccttcgggggctgatcagtggcggacgggtgagtaacgcgtgaggaacctgcccttatgagcggaataacgtcgggaaactgacgctaataccgcataatgcatcaccggggcatcgcggtgatgccaaagcttcggcgcataaggatggactcgc

SEQ ID NO: 897 - DNA, 225 bp, Unknown
  Encodes 16S rRNA from Syntrophococcus
agagtttgatcatggctcaggatgaacgctggcggcgtgcttaacacatgcaagtcgaacgagaaccttacgacggagacttcggttgaagatgtaagaattctagtggcggacgggtgagtaacgcgtgggtaacctgcccatgagaggaggataacagggagaaattcttgctaatactctatatgcttacggtatcgcatgatactgtgaggaaatgaattt

SEQ ID NO: 898 - DNA, 225 bp, Unknown
  Encodes 16S rRNA from Clostridium IV
agagtttgatcatggctcaggatgaacgctggcggcgtgcctaacacatgcaagtcgaacgaagctcctgatttgatcccctcggggtaatttgacggatgacttagtggcggacgggtgagtaacgcgtgagcaacctgcctttcagagggggataacggttggaaacgaccgctaataccgcataacacagaggaaccgcatgattcttttgtcaaagctgag

SEQ ID NO: 899 - DNA, 225 bp, Unknown
  Encodes 16S rRNA from Demequina
agagtttgatcatggctcaggacgaacgctggcggcgtgcttaacacatgcaagtcgaacggtgaacctggagcttgctccgggggatcagtggcgaacgggtgagtaacacgtgagtaacctgccccagacactgggataacctcgggaaaccggggctaataccggatacgagacgctcgggcatccgaagcgtctggaaagatttatcggtctgggatggac

SEQ ID NO: 900 - DNA, 225 bp, Unknown
  Encodes 16S rRNA from Lachnospiracea incertae sedis
agagtttgatcctggctcaggatgaacgctggcggcgtgcttaacacatgcaagtcgaacggaacatttcgcccgatgattgaagtagcttgctacggattgaatcaactgaaatgtttagtggcggacgggtgagtaacgcgtgggtaacctaccttacacagggggataacagttagaaatgactgctaataccgcataagcgcacagtaccgcatggtacgg

SEQ ID NO: 901 - DNA, 225 bp, Unknown
  Encodes 16S rRNA from Saccharofermentans
agagtttgatcatggctcaggatgaacgctggcggtatgcttaacacatgcaagtcgaacggtagcagcaatgctatagtggcggacgggtgagtaacgcgtgaacaatctgcctgtatcaggggaataacagttcgaaaggactgctaataccgcatatgatcatagaggggcatccctcagtgatgaaagatttatcggatacagatgagttcgcgtcctatt

SEQ ID NO: 902 - DNA, 225 bp, Unknown
  Encodes 16S rRNA from Sphaerisporangium
agagtttgatcatggctcaggacgaacgctggcggcgtgcttaacacatgcaagtcgagcggaaaggcccttcggggtactcgagcggcgaacgggtgagtaacacgtgagcaacctgtccttgactctgggataagcctgggaaaccgggtctaataccggataggacctgtctccgcatgggggtgggtggaaagttttttcggtcaggggtgggctcgcggc

SEQ ID NO: 903 - DNA, 225 bp, Unknown
  Encodes 16S rRNA from Anaeroplasma
agagtttgatcatggctcaggattaacgctggcggcgtgcctaatacatgcaagtcgaatggttagcttgctaaccatggcgaacgggtgagtaacacgtaggcaacctgtctaagagacgaggataaccattggaaacgatggataatactggataagatattgggaggcatcttctgatatttaaagatttatcgctaatagaggggcctgcggcgcattagc

SEQ ID NO: 904 - DNA, 225 bp, Unknown
  Encodes 16S rRNA from Geobacillus
agagtttgatcctggctcagaatgaacgctggcggcatggattaggcatgcaagtcggacggggtgcagcgatgcacccagtggcgaaagggtgcgcaacgcgtggggaacctgcccccggatccgggacaagcgctggaaacggcgtctgatacgggatgcggaggggggccgcatggcccccgctccaaagattcatcgtccggggagggccccgcgtcccat

SEQ ID NO: 905 - DNA, 225 bp, Unknown
  Encodes 16S rRNA from Prevotella
agagtttgatcatggctcaggatgaacgctagctacaggcctaacacatgcaagtcgaggggcagcatgggagaagcttgcttttcccgatggcgaccggcgaatgggtgagtcacgcgtgtccaacctgccttcagcccggggatagcccttggaaatgaggattaagacccgatagatggaagttccgcatggcgcttccatgaaactggactgaagatgggg

SEQ ID NO: 906 - DNA, 225 bp, Unknown
  Encodes 16S rRNA from Clostridium XlVa
agagtttgatcctggctcaggatgaacgctggcggcgtgcctaacacatgcaagtcgaacgatgaagcggggaggaagttttcggatggaattcctgtggaagagtggcggacgggtgagtaacgcgtggataacctgccccgtacagggggatagcagcgggaaactgctggtaataccgtatatgcgcacaactgccgcatggcagggtgtggaaagttacgg

SEQ ID NO: 907 - DNA, 225 bp, Unknown
  Encodes 16S rRNA from Victivallis
agagtttgatcatggctcagaacgaacgctggcggcatggattaggcatgcaagtcgaacgaagcagcaatgcttagtggcgcaagggtgaggaacacgtgagtgacctacccgcaagtttggaacagctcctggaaacgggaattaataccggatgtgatcgataggccgcatggtttattgattaaagcagcaatgcgcttgcggatgggctcgcgtcccatt

SEQ ID NO: 908 - DNA, 225 bp, Unknown
  Encodes 16S rRNA from Bacteroides
agagtttgatcatggctcaggatgaacgctagctacaggcttaacacatgcaagtcgaggggcatcaggtatctagcttgctaggtatgctggcgaccggcgcacgggtgcgtaacacgtatccaacctgcccgcagctcagggacagcctttcgaaagaaagattaatacctgacggtctctaccggggacatccccggcagagtaaagattcatcggcggcgg

SEQ ID NO: 909 - DNA, 225 bp, Unknown
  Encodes 16S rRNA from Demequina
agagtttgatcctggctcaggacgaacgctggcggcgtgcttaacacatgcaagtcgaacggtgaactcggagcttgctccgggggatcagtggcgaacgggtgagtaacacgtgagtaacctgccccagactctgggataacctcgggaaaccggggctaataccggatacgagacgttcgggcatccgaagcgtctggaaagatttatcggtctgggatggac

SEQ ID NO: 910 - DNA, 225 bp, Unknown
  Encodes 16S rRNA from Paraeggerthella
agagtttgatcatggctcaggatgaacgctggcggcgtgcctaacacatgcaagtcgaacggttaagccggcttcggccgggaatacagtggcgaacgggtgagtaacacgtgaccaacctgccccccgccccgggatagccccccgaaagggggattaataccgggtactccgcaagggccgcatggcccctgcgggaaagctccggcggcgggggatggggtc

SEQ ID NO: 911 - DNA, 225 bp, Unknown
  Encodes 16S rRNA from Paraprevotella
agagtttgatcatggctcaggatgaacgctagcggcaggcttaacacatgcaagtcgaggggcagcgagagagtagcaatacttttgtcggcgaccggcgcacgggtgagtaacgcgtatgcaacctttcccagacagggggatagcccagggaaacttggattaataccccgtaggccgagggatggcatcgtccttcggttaaagttccggcggtctggggtg

SEQ ID NO: 912 - DNA, 225 bp, Unknown
  Encodes 16S rRNA from Pseudoflavonifractor
agagtttgatcatggctcaggacgaacgctggcggcgtgcttaacacatgcaagtcgaacgagggtattagtcagcttgctgattgatactcgagtggcggacgggtgagtaacgcgtgaggaacctgtcttcatcagggggataacgtcccgaaagggatgctaataccgcatgagaccacgataccgcatggtattgaggtcaaaggagcgatccggatgaag

SEQ ID NO: 913 - DNA, 225 bp, Unknown
  Encodes 16S rRNA from Roseburia
agagtttgatcctggctcaggatgaacgctggcggcgtgcttaacacatgcaagtcgaacggacttctccggaaataagcttcggcagaaagaaggaggagttagtggcggacgggtgagtaacgcgtgggcaacctgccttacattgggggataacagttagaaatgactgctaataccgcataagaccacgaggccgcatggccacggggtaaaagttccggc

SEQ ID NO: 914 - DNA, 225 bp, Unknown
  Encodes 16S rRNA from Gelidibacter
agagtttgatcatggctcaggataaacgctagcggcaggcctaacacatgcaagtcgagcggcagcgggagtggcaacacttgccggcgagcggcggacgggtgagtaacgcgtatgcaacctgcccaccacacggagatagccgaccgaaaggacgattaaactccgatggcacctcatcaaggcatcttcttgaggttaaatattcataggtggtggatgggc

SEQ ID NO: 915 - DNA, 225 bp, Unknown
  Encodes 16S rRNA from Clostridium IV
agagtttgatcctggctcaggacgaacgctggcggcgtgcctaacacatgcaagtcgaacggaactttaccggatgaagttttcggatggaatcagataaagtttagtggcggacgggtgagtaacgcgtgagtaacctgcccttcagagggggacaacgtcttgaaaaggacgctaataccgcataacatatattcatcgcatggtggatatatcaaaggagca

SEQ ID NO: 916 - DNA, 225 bp, Unknown
  Encodes 16S rRNA from Rhizobium
agagtttgatcatggctcagaacgaacgctggcggtatgcttaacacatgcaagtcgcacgagaaagttcttcggaatgagtaaagtggcgtacgggtgagtaatgtataggaatctacccagtaatgaggaataagcactggaaacggtgtctaataccacatactaccgatttatcgggaaaggtttaatcttcgggttaaactgttattggatgagcctata

SEQ ID NO: 917 - DNA, 225 bp, Unknown
  Encodes 16S rRNA from Acholeplasma
agagtttgatcatggctcaggatgaacgctggcggcgtgcctaatacatgcaagtcgaacggataccttcgggtattagtggcgaacgggtgagtaacacgtaggtaatctaccttaaagacggggataacagatggaaacgactgttaataccggatagtatatgaagtcgcatgattttatatttaaagttcccacgggaacactttaagatgagcctgcggc

SEQ ID NO: 918 - DNA, 225 bp, Unknown
  Encodes 16S rRNA from Clostridium XlVa
agagtttgatcctggctcaggatgaacgctggcggcgtgcctaacacatgcaagtcgaacggagatgcatcagcgagaggattcgtccgatcaagatgtatcttagtggcggacgggtgagtaacgcgtggataacctgcctccatccgggggatagcagttggaaacgactggtaataccgcatgagcgcacggtaaggcatcttacagtgtgaaaagattaat

SEQ ID NO: 919 - DNA, 225 bp, Unknown
  Encodes 16S rRNA from Bacteroides
agagtttgatcatggctcaggatgaacgctagcggcaggcttaacacatgcaagtcgaggggcagcgagagagtagcaatacttttgtcggcgaccggcgcacgggtgagtaacgcgtatgcaacctttcccagacagggggatagcccagggaaacttggattaataccccgtaggccgagtggcggcatcgccgttcggttaaagttccggcggtctggggtg

SEQ ID NO: 920 - DNA, 225 bp, Unknown
  Encodes 16S rRNA from Bacteroides
agagtttgatcctggctcaggatgaacgctagcggcaggcttaacacatgcaagtcgaggggcagcgtgggggtagcaatacttccgacggcgaccggcgcacgggtgagtaacgcgtatgcaacctttcccagacagggggatagcccagggaaacttggattaataccccgtaggccacaggcgggcatccgccagtggttaaagttccggcggtctggggtg

SEQ ID NO: 921 - DNA, 225 bp, Unknown
  Encodes 16S rRNA from Papillibacter
agagtttgatcatggctcaggatgaacgctggcggcgtgcataacacattcaagtcgaacgaagcactttggacggatcccttcggggtgaagactgatttgacttagtggcggacgggtgagtaacgcgtgagcaacctgccttgaagagggggataacacagggaaacttgtgctaataccgcataacgtacgtggatcgcatggtccgtgtaccaaagcctt

SEQ ID NO: 922 - DNA, 225 bp, Unknown
  Encodes 16S rRNA from Fusibacter
agagtttgatcctggctcaggattaacgctggcggcgtgcctaacacatgcaagtcgagcgggaaatttgagagcgaagcttcggcagagctcttaaatggagagcggcggacgggtgagtaacgcgtaggtaacctgccctgcacagagggatagccactggaaacggtgattaatacctcataaaactgttttgccgcatgacagaacagccaaagatttatc

SEQ ID NO: 923 - DNA, 225 bp, Unknown
  Encodes 16S rRNA from Coraliomargarita
agagtttgatcctggctcagagtgaacgctggcggcgtggctaagacatgcaagtcgagcgagaaggtgccttcgggtaccggaaagcggcaaacgggtgcgtaacacgtaagtaacctgcccttaagacgggaacagcttgatgaaaattaagataatgcccgatatccgcttctttcgcatgagagaagtcggaaaggtttgtgatgacgcttaaggaggggc

SEQ ID NO: 924 - DNA, 225 bp, Unknown
  Encodes 16S rRNA from Papillibacter
agagtttgatcatggctcaggattaacgctggcggcgtgcataacacattcaagtcgaacggagtgtagaaatacacttagtggcggacgggtgagtaacgcgtgagcaatctaccttccagtgcgggataacaaccggaaacagttgctaataccgcatgaaccggcagcatcgcatggtgcaaccggcaaaggcttgctgctggaagatgagcttgcgtccga

SEQ ID NO: 925 - DNA, 225 bp, Unknown
  Encodes 16S rRNA from Clostridium XlVa
agagtttgatcatggctcaggatgaacgctggcggcgtgcctaacacatgcaagtcgaacggagctgcgacgctgatgattggagtacttgtacgaagagaatcttgtcgtagcttagtggcggacgggtgagtaacgtgtggataacctggtccaatctgggggatagcagctggaaacggctggtaataccgcataagcgcacggtgtggcatcacacagtgt

SEQ ID NO: 926 - DNA, 225 bp, Unknown
  Encodes 16S rRNA from Acholeplasma
agagtttgatcatggctcaggatgaacgctggcggcgtgcctaatacatgcaagtcgaacgagctgcttcggcagcgagtggcgaacgggtgagtaacatatgaataatctacctctttaactgggataccagtctgaaaagactgctaataccggataggtaatactgaggcatctcggtattattaaagatgcgtttgcatcgaattgagatgagttcatatc

SEQ ID NO: 927 - DNA, 225 bp, Unknown
  Encodes 16S rRNA from Catenibacterium
agagtttgatcggccacattggaactgagacacggtccaaactcctacgggaggcagcagtaaggagttttcggcaatgggggaaaccctgaccgagcaacgccgcgtgagcgatgacggtcctttggattgtaaagctctgttgtaagccatgaaagatagctttaggaaatgaaagttatttgacgacagcttaccagaaagccacggctaactacgtgccag

SEQ ID NO: 928 - DNA, 225 bp, Unknown
  Encodes 16S rRNA from Clostridium IV
agagtttgatcatggctcaggatgaacgctggcggcgtgcttaacacatgcaagtcgaacgaggttagcggcttcggccgataaccgagtggcggacgggtgagtaacgcgtgaacaatctgtcctgcaaagggggataacaactggaaacagttgctaataccgcataagaccacgaagtcgcatggctttgaggtaaaagcagcgatgcgatgcagggtgagt

SEQ ID NO: 929 - DNA, 225 bp, Unknown
  Encodes 16S rRNA from Clostridium IV
agagtttgatcatggctcaggatgaacgctggcggcgtgcttaacacattcaagtcgaacggacgaggggagcttgctccccaagttagtggcggacgggtgagtaacgcgtgagcaacctgcctttctaagcgggataacagagggaaaccgctgctaataccgcataacgtatgatgaacgcatgttcgacataccaaaggagcgatccgaagaaagatgggc

SEQ ID NO: 930 - DNA, 225 bp, Unknown
  Encodes 16S rRNA from Clostridium IV
agagtttgatcatggctcaggacgaacgctggcggtatgcctaacacatgcaagtcgaacgggtgtgtagagagcttgctctttatttcactagtggcggacgggtgagtaacgcgtgagtaatctgccttgaagtgggggataacatttggaaacaagtgctaataccgcgtaatatacgttcttcgcatgaagtttgtatcatagtttttcgcttcaagatga

SEQ ID NO: 931 - DNA, 225 bp, Unknown
  Encodes 16S rRNA from Nitrobacter
agagtttgatcatggctcagagcgaacgctagcggaatgctttatacatgcaagtcgaacgaaaaaccatacggagtagcaatacaaagtggaagtttttagtggcgaacgggtgagtaatagataggaacttgccgagtagtgggggacaacagatagaaatgtctgctaataccgcatacgcccgagaggggaaagatttatcgctatttgagaggcctattc

SEQ ID NO: 932 - DNA, 225 bp, Unknown
  Encodes 16S rRNA from Victivallis
agagtttgatcatggctcagaacgaacgctggcggcatggattaggcatgcaagtcgaacgaagcagcaatgcttagtggcgcaagggtgaggaacacgtgagtgacctgcccgcaagtttggaacagctcctggaaacgggaattaataccggatgtgatcatagagctgcatggttttatgattaaagcagcaatgcgcttgcggatgggctcgcgtcccatt

SEQ ID NO: 933 - DNA, 225 bp, Unknown
  Encodes 16S rRNA from Selenomonas
agagtttgatcctggctcaggacgaacgctggcggcgtgcttaacacatgcaagtcgaacgagacgattgaaagcttgcttttgaaagtcgagtggcaaacgggtgagtaacgcgtagacaacctgcctttgagatggggacaacagtccgaaaggactgctaataccgaatgttgtggattttccgcatgggagatccaccaaagatgacctcttcctgaaagt

SEQ ID NO: 934 - DNA, 225 bp, Unknown
  Encodes 16S rRNA from Enterorhabdus
agagtttgatcatggctcaggatgaacgctggcggcgtgcctaacacatgcaagtcgaacggttaaagcgccttcgggcgtgcatagagtggcgaacgggtgagtagcacgtgaccaacctgccccgcgcaccgggacagcctcgcgaaagcgggattaataccggatactccggccgcaccgcatggtgcggccgggaaagctccggcggcgcgggatggggtc

SEQ ID NO: 935 - DNA, 225 bp, Unknown
  Encodes 16S rRNA from Eubacterium
agagtttgatcatggctcaggacgaacgctggcggtatgcttaacacatgcaagtcgaacgagaagcgggtattggaggtttcggccgaagagacctgcagaaagtggcgaacgggtgagtaacgcgtgggcaacctgcctcatggaaagggatagcctcgggaaactgggagtaaaaccttataacatatgcttatcgcatggtaggcatatcaaaactccggt

SEQ ID NO: 936 - DNA, 225 bp, Unknown
  Encodes 16S rRNA from Roseburia
agagtttgatcctggctcaggatgaacgctggcggcgtgcttaacacatgcaagtcgaacgaagcattttgatctgatcatttcggtgtgaagaacttaatgacttagtggcggacgggtgagtaacgcgtgggtaacctacctcatacagggggatagcagttggaaacgactgataataccgcataagcgcacaggaccgcatggtccagtgtgaaaagcctt

SEQ ID NO: 937 - DNA, 225 bp, Unknown
  Encodes 16S rRNA from Prevotella
agagtttgatcatggctcaggatgaacgctagctacaggcttaacacatgcaagtcgaggggcagcatggggactgcttgcagttcccgatggcgaccggcgcacgggtgagtaacgcgtatccaacctgcccgcaaccgcggaatagcccgccgaaaggcggattaatgccgcatgagctcgcgagagggcatctggccgcgagcaaaggtatttccggttgcg

SEQ ID NO: 938 - DNA, 225 bp, Unknown
  Encodes 16S rRNA from Asaccharobacter
agagtttgatcctggctcaggatgaacgctggcggcgtgcttaacacatgcaagtcgaacgagaaagcaccctcgggtgcgagtagagtggcgaacgggtgagtaacacgtgagcaacctgccccccgcaccgggataaccgggcgaaagcccggctaataccggatgcgccccggcgcgcgcatgcgcggcgggggaaagccctggcggcgggggatgggctcg

SEQ ID NO: 939 - DNA, 225 bp, Unknown
  Encodes 16S rRNA from Bacteroides
agagtttgatcatggctcaggatgaacgctagctacaggcttaacacatgcaagtcgaggggcagcatggtgtgtgcttgcacacactgatggcgaccggcgcacgggtgagtaacgcgtatccaacctgcccggtactcgggaacagccctctgaaaggaggattaatgcccgatgttccgtgcatcccgcctgggatgcccggcaaagattcatcggtaccgg

SEQ ID NO: 940 - DNA, 225 bp, Unknown
  Encodes 16S rRNA from Clostridium XlVa
agagtttgatcctggctcaggatgaacgctggcggcgtgcctaacacatgcaagtcgaacgaggtattgcaatcgagatggaggagcttgctccgaagtctcactcgtgataccgagtggcggacgggtgagtaacgcgtggagaacctgccccgtacagggggataccaattagaaatgattgttaataccgcataagcgcacatgaccgcatggtcgagtgtg

SEQ ID NO: 941 - DNA, 225 bp, Unknown
  Encodes 16S rRNA from Gelidibacter
agagtttgatcctggctcaggataaacgctagcggcaggcctaacacatgcaagtcgagcggcagcgggagtagcaatacttgccggcgagcggcggacgggtgagtaacgcgtatgcaacctgcccaccacacggagatagccgaccgaaaggacgattaaactccgatggcacctcatcaaggcatctttttgaggttaaatatttataggtggtggatgggc

SEQ ID NO: 942 - DNA, 225 bp, Unknown
  Encodes 16S rRNA from Brevundimonas
agagtttgatcatggctcaggacgaacgctggcggtgtgcctcatacatgcaagtcgaacgataaggttccttcgggaatacataagtggcggacgggtgagtacaacataggaaatctgccctaaactgggggacaacagagggaaactcctgctaataccccatatgagcttagttgaaatactaatcttgaaagctccggcggtttaggatgagcctgtgcc

SEQ ID NO: 943 - DNA, 225 bp, Unknown
  Encodes 16S rRNA from Clostridium XlVa
agagtttgatcctggctcaggatgaacgctggcggcgtgcctaacacatgcaagtcgaacgaagcgcccggaacagaggattcgtccgaagggaagggatgactgagtggcggacgggtgagtaacgcgtggaaaacctgccccatgcagggggacaacagggagaaatccctgctaataccgcataagcgcacggcacggcatcgtgcagtgtgaaaagattta

SEQ ID NO: 944 - DNA, 225 bp, Unknown
  Encodes 16S rRNA from Prevotella
agagtttgatcctggctcaggatgaacgctagctacaggcttaacacatgcaagtcggggggcagcacgggaagcagcaatgcttttgggtggcgaccggcgaatgggtgagtaacgagtatccaacctgccccgcgctccgggacagccccgcgaaagcgggattaataccggatgcggcatggttcccgcatgggctccatgtcaaagattcatcggcgcggg

SEQ ID NO: 945 - DNA, 225 bp, Unknown
  Encodes 16S rRNA from Oscillibacter
agagtttgatcatggctcaggatgaacgctggcggcgtgcctaacacatgcaagtcgaacgagaatcgatggaaagaggcttcggccaatggaagtcgaggacagtggcggacgggtgagtaacacgtgagcaacctgcccttcagagggggacaacagttggaaacgactgctaataccgcataacgtatcgaggaggcatctccatgataccaaagatttatc

SEQ ID NO: 946 - DNA, 225 bp, Unknown
  Encodes 16S rRNA from Asteroleplasma
agagtttgatcctggctcaggataaacgctggcggcgtgcctaatacatgcaagtcgaacgaggtgtagcaatacacctagtggcgtacgggtgagtaacacgttgggaacctgccctttagaccggaataccaagcggaaacgtttgctaatgccggataacagcacgtaagcgcaggcttatgtgctcaaaggcgactattgtcgcgcttaaggatggccctg

SEQ ID NO: 947 - DNA, 225 bp, Unknown
  Encodes 16S rRNA from Anaeroplasma
agagtttgatcctggctcaggataaacgctggcggcgtgcctaatacatgcaagttgaacggagagcttcggctcttagtagcgaacgggtgagtaacacgtaggcaacctgccctgttgactgggataacaagacgaaagacttgctaataccggatgataacgtatatcgcatgatatatggatgaaagttgggacacaacacaacaggatgggcctgcggcg

SEQ ID NO: 948 - DNA, 225 bp, Unknown
  Encodes 16S rRNA from Oscillibacter
agagtttgatcatggctcaggacgaacgctggcggcgtgcttaacacatgcaagtcgaacgaagctctcacgcttgagttttcggacaagagggtgagaagacttagtggcggactggtgagtaacgcgtgagcaacctgccctccggtgggggacaacagttggaaacgactgctaataccgcatgacgtatacggaccgcatgatctgtataccaaagcttaa

SEQ ID NO: 949 - DNA, 225 bp, Unknown
  Encodes 16S rRNA from Bilophila
agagtttgatcatggctcagattgaacgctggcggcgtgcttaacacatgcaagtcgaacgtgaaagtccttcgggacgagtaaagtggcgcacgggtgagtaacgcgtggataatctaccttcaagatggggataacggctggaaacggtcgctaataccgaatacgcttttttatttatctttaaaaggaaagatggcctctgcttgcaagctatcgcttgaa

SEQ ID NO: 950 - DNA, 225 bp, Unknown
  Encodes 16S rRNA from Oscillibacter
agagtttgatcatggctcaggacgaacgctggcggcgtgcctaacacatgcaagtcgaacgaagctccgagaaacaagacttcggtcaagcggaacggatgactgagtggcgaacgggtgagtaacgcgtgaggaacctgcctttcagtgggggacaacagttggaaacgactgctaataccgcatgatgtaccatgggggcatccccggggtaccaaagattta

SEQ ID NO: 951 - DNA, 225 bp, Unknown
  Encodes 16S rRNA from Clostridium IV
agagtttgatcctggctcaggacgaacgctggcggcgtgcttaacacatgcaagtcgaacgaagttccgcggaatgagatttcggtcaaaagaagcggacacttagtggcggacgggtgagtaacgcgtgagtaacctgcctttcagaggggaataacatttggaaacgaatggtaataccgcataacatcaagttatcgcatgatagattgatcaaaggagcaa

SEQ ID NO: 952 - DNA, 225 bp, Unknown
  Encodes 16S rRNA from Prevotella
agagtttgatcctggctcaggatgaacgctagctacaggcttaacacatgcaagtcgaggggcagcgagggggcagcaatgcccctgtcggcgaccggcgcacgggtgagtaacgcgtatccaacctgccccatggtagggaatagcccggagaaatccggattaatgccctatgttctccgacgatggcatctgacttggagcaaagatttatcgccatgggat

SEQ ID NO: 953 - DNA, 225 bp, Unknown
  Encodes 16S rRNA from Geosporobacter
agagtttgatcatggctcaggatgaacgctggcggcgtgcctaacacatgcaagtcgagcgggaaatctccaattgaaggttcgctggaaagcggagatggatagcggcggacgggtgagtaacgcgtaggtaagctgccctatgcacagggatagcctagggaaacctggattaatacctgatgacgctgcgaggtcacatggccatgcagccaaagttttttc

SEQ ID NO: 954 - DNA, 225 bp, Unknown
  Encodes 16S rRNA from Butyricimonas
agagtttgatcatggctcaggatgaacgctagcggcaggcttaacacatgcaagtcgaggggcagcgcgtcgtagcaatacgatggcggcgaccggcgcaagggtgcgtaacgcgtgagcaacatgcccgcaacagggggataaccggaggaaactccgactaataccccataaggatgtagagtggcatcattcagcatctaaacttacgagggttgcggattg

SEQ ID NO: 955 - DNA, 225 bp, Unknown
  Encodes 16S rRNA from Pseudoflavonifractor
agagtttgatcatggctcaggacgaacgctggcggcgtgcttaacacatgcaagtcgaacgagggtgaatgggagcttgcttctgttcacccgagtggcggacgggtgagtaacgcgtgaggaacctgtcttcatcagggggataacttcccgaaagggatgctaataccgcataagaccacggtaccgcatggtattgaggtcaaaggagcgatccggatgaag

SEQ ID NO: 956 - DNA, 225 bp, Unknown
  Encodes 16S rRNA from Barnesiella
agagtttgatcatggctcaggatgaacgctagcgacaggcctaacacatgcaagtcgaggggcagcgagtttgtagcaatacagatgtcggcgaccggcgcacgggtgcgtaacaggtgtgcaacctggcctataccaagggatagcccgctgaaaggcggattaagactttatatgttatggtgagacatctcattataatgaaacgtgagggtataggatggg

SEQ ID NO: 957 - DNA, 225 bp, Unknown
  Encodes 16S rRNA from Selenomonas
agagtttgatcctggctcaggacgaacgctggcggcgtgcttaacacatgcaagtcgaacgagacgattgaaagcttgcttttgaaagtcgagtggcaaacgggtgagtaacgcgtaggcaacctaccttcgagatggggacaacagtccgaaaggactgctaataccgaatgttgtatcaattccgcatggagttggtattaaagatggcctctatttataagc

SEQ ID NO: 958 - DNA, 225 bp, Unknown
  Encodes 16S rRNA from Prevotella
agagtttgatcctggctcaggatgaacgctagcggcaggcttaacacatgcaagtcgaggggcagcgagaggtagcaatactttgtcggcgaccggcgaaagggtgagtaacgcgtgagcgacgtgcccgtcacagggggacaagggctggaaacggcttctgataccccataggaatgtatgcttcatggtgtatgtttgaaagatttatcggtgacggatcgg

SEQ ID NO: 959 - DNA, 225 bp, Unknown
  Encodes 16S rRNA from Enterorhabdus
agagtttgatcatggctcaggatgaacgctggcggcgtgcctaacacatgcaagtcgaacggttaagccggcttcggccgggtatagagtggcgaacgggtgagtaacacgtgaccaacctgccccgcgctccgggatagccccgcgaaagcgagattaataccggatgacgcgggaggggcgcatgcccctcccgccaaagcctcaacggcgcgggatggggtc

SEQ ID NO: 960 - DNA, 225 bp, Unknown
  Encodes 16S rRNA from Oscillibacter
agagtttgatcatggctcaggacgaacgctggcggcgtgcctaacacatgcaagtcgaacgagaatcatatgacggaggcttcggccaactgagtatgaggaaagtggcgaacgggtgagtaacgcgtgaggaacctgcctcggagtgggggacaacagttggaaacgactgctaataccgcataatgtgcctggaaggcatcttccgggtaccaaagctttatg

SEQ ID NO: 961 - DNA, 225 bp, Unknown
  Encodes 16S rRNA from Pelotomaculum
agagtttgatcatggctcaggacaaacgctggcggcgtgcttaacacatgcaagtcgtacggagctgtcaggcggaatccttcgggaggaagcctgagagcttagtggcggacgggtgagtaacgcgtgagcaacctgcccataagagggggataacagttggaaacgactgctaataccgcatgagaccacaacaccgcatggtggaggggtcaaagagcaatc

SEQ ID NO: 962 - DNA, 225 bp, Unknown
  Encodes 16S rRNA from Cellulosilyticum
agagtttgatcatggctcaggataaacgctggcggcgcacataagacatgcaagtcgaacgagtttaatacctagcttgctaggtaagcgactagtggcggactggtgagtaacacgtaaggaacctgcctattagagaggaatacctttgagaaatcagagctaatacctcatatgccttaactactgcatggtagaagagggaaaggagcaatccgctaatag

SEQ ID NO: 963 - DNA, 225 bp, Unknown
  Encodes 16S rRNA from Clostridium IV
agagtttgatcatggctcaggacgaacgctggcggcgtgcttaacacatgcaagtcgaacgagaatccgtggaaagagttttcggacaatggaagcggagggaagtggcggacgggtgagtaacgcgtgaggaacctgccttagagagggggacaacagctggaaacggctgctaataccgcatgacacacagtggaggcatctttactgtgtcaaagatttatc

SEQ ID NO: 964 - DNA, 225 bp, Unknown
  Encodes 16S rRNA from Parabacteroides
agagtttgatcatggctcaggatgaacgctagcgacaggcttaacacatgcaagtcgaggggcagcgggggcgatggcaacattgcctgccggcgaccggcgcactggtgagtaacacgtatgcaacctgccccgcacagggggataacccagagaaatttggcctaataccccgtaacaccgttgggggcatccccggtggttgaaagaggcgactcggtgcgg

SEQ ID NO: 965 - DNA, 225 bp, Unknown
  Encodes 16S rRNA from Papillibacter
agagtttgatcctggctcaggataaacgctggcggcgcacataagacatgcaagtcgaacgaacttaattacttgcttgcaagtaaagcggttagtggcggactggtgagtaacacgtaagaaatctgcctattagtggggaataacagtgagaaatcattgctaataccgcatatgccataagaatcgcatgattctagtgggaaaggagcaattcgctaatag

SEQ ID NO: 966 - DNA, 225 bp, Unknown
  Encodes 16S rRNA from Bacteroides
agagtttgatcctggctcaggatgaacgctagctacaggcttaacacatgcaagtcgcggggcatcgcggtaagtagcaatactttctggcggcgaccggcggatgggtgagtaacgcgtatccaacctggccctatctcggggacagcccctcgaaagagggattaatacccgatgttccctggaattcgcatgttttccagtgcaaaggcatatgtcggatag

SEQ ID NO: 967 - DNA, 225 bp, Unknown
  Encodes 16S rRNA from Prevotella
agagtttgatcatggctcaggatgaacgctagctacaggcttaacacatgcaagtcgaggggcatcatgcaggttgcttgcaacctgtgatggcgaccggcgcacgggtgcgtaacgcgtatccaaccttccccgcagtagggtccagcccgttgaaagacggattaatcccctatgttgtccattgacggcatccgatttggacgaaagatttgatcgctgcgg

SEQ ID NO: 968 - DNA, 225 bp, Unknown
  Encodes 16S rRNA from Hydrogenoanaerobacterium
agagtttgatcatggctcaggagaaacgctggcggcgcacataagacatgcaagtcgaacggaatttagtcgaatgtttacatgagacgaaaatttagtggcggacgggtgagtaacacgtgagcaacctgcctttaggagggggataacattgagaaatcagtgctaataccgcataacgcataatgttcgcatgaacgatatgccaaaggagaaatccaccta

SEQ ID NO: 969 - DNA, 225 bp, Unknown
  Encodes 16S rRNA from Clostridium XlVa
agagtttgatcctggctcaggatgaacgctggcggcgtgcctaacacatgcaagtcgaacggaggtgtccgtacgggtgcttcggcatccagggcaccttagtggcggacgggtgagtaacgcgtggagaacctggcccatgcagggggataacagcgggaaaccgctgctaataccgcataaacgcgaaagggggcatcccttttggcggaaagtgtaagcggc

SEQ ID NO: 970 - DNA, 204 bp, Unknown
  Encodes 16S rRNA from Prevotella
agagtttgatcatggctcaggatgaacgctagctacaggctttggtcaatgggcgaaagcctgaaccagccaagtagcgtgcaggatgacggccctatgggttgtaaactgtttttatacggggataaaacgagggacgtgtccctccttgcaggtaccgtatgaataaggaccggctaattccgtgccagcagccgcggtaat

SEQ ID NO: 971 - DNA, 225 bp, Unknown
  Encodes 16S rRNA from Clostridium IV
agagtttgatcctggctcaggacgaacgctggcggcgcgcctaacacatgcaagtcgaacggagagtgggttttgattctttcgggatgaaaagctcatttcttagtggcggacgggtgagtaacacgtgagcaacctgccttgcagagcgggataacggttggaaacgatcgctaataccgcataatatatgattgtcgcatggctttcatatcaaagatttat

SEQ ID NO: 972 - DNA, 225 bp, Unknown
  Encodes 16S rRNA from Howardella
agagtttgatcctggctcaggataaacgctggcggcgcacataagacatgcaagtcgaacggaagtcgtaattaaaaaggaacaaagatttatcggagtgagattttaattacaatggctttagtggcggactggtgagtaatgtataagtaacctgcctattagaggggaacaacagttggaaacagctgctaataccgcatatgccataagaatcgcatggtt

SEQ ID NO: 973 - DNA, 225 bp, Unknown
  Encodes 16S rRNA from Slackia
agagtttgatcatggctcaggatgaacgctggcggcgtgcctaacacatgcaagtcgaacggttaaggcatcttcggatgcgaataaagtggcgaacgggtgagtaacacgtgaccaacctgccccccgcaccgggacaacgggcggaaacgcctgctaataccggatactccgcgacggacgcctgtccggcgcgggaaagcccaggcggcgggggatggggtc

SEQ ID NO: 974 - DNA, 225 bp, Unknown
  Encodes 16S rRNA from Methylobacter
agagtttgatcatggctcagaatgaacgctggcggtatgcttaatacatgcaagtcgaacgagaaagtccagcaatggatgagtaaagtggcgtacgggtgagtaatatataggaatctacccagtaatgaggaataagcactggaaacggtgtctaataccacatactaccatttatttgggaaagggttagtagcaatactaacttgttattggatgagccta

SEQ ID NO: 975 - DNA, 225 bp, Unknown
  Encodes 16S rRNA from Treponema
agagtttgatcctggctcagaacgaacgctggcggcgcgtcttaagcatgcaagtcgggcgggatcgtggtgcttgcaccacgtgagagcggcggactggcgaggagcgcgtgggtgacgcaccccccggacggggacagccggcagaaatgccgggtgataccggatgaggtcccccttgttggaggagggggaggaaaggggcttcggccccgccgggggagc

SEQ ID NO: 976 - DNA, 187 bp, Unknown
  Encodes 16S rRNA from Clostridium XlVa
agagtttgatcctggctcaggataaacgctggcggcgtgcttaattggacaatgggggcaaccctgatccagcgacgccgcgtgagcgatgaagtatctcggtatgtaaagctctatcagcagggaagataatgacggtacctgactaagaagcaccggctaaatacgtgccagcagccgcggtaat

SEQ ID NO: 977 - DNA, 225 bp, Unknown
  Encodes 16S rRNA from Devosia
agagtttgatcatggctcagaacgaacgctgtcgacatgcttaacacatgcaagtcgtacgggtataacttgttataccagtggcaaacgggtgagtaatacgtagatatgtacccagtagtctcgaataacagttggaaacgattgataatacgagatactatggtaacatcaaaggtttagcaataaactgctattggagcagtctacggtggattagatagt

SEQ ID NO: 978 - DNA, 225 bp, Unknown
  Encodes 16S rRNA from Ruminococcus
agagtttgatcatggctcaggacgaacgctggcggcacgcttaacacatgcaagtcgaacggagatattcccttcgggggataacttagtggcggacgggtgagtaacacgtgagcaacctgccttacagagaggaataatgactggaaacggtcactaatacctcataaaatatttgaatcgcatggttcggatatcaaagatttatcgctgtaagatgggctc

SEQ ID NO: 979 - DNA, 225 bp, Unknown
  Encodes 16S rRNA from Lachnospiracea incertae sedis
agagtttgatcctggctcaggatgaacgctggcggcgtgcctaacacatgcaagtcgaacgaagcacccctcccgaagattgacgtagcttgctacagattgattcaattggggtgacttagtggcggacgggtgagtaacgcgtgggtaacctgccctatagagggggacaacagttggaaacgactgctaataccgcataacacatttgcaccgcatgatgcg

SEQ ID NO: 980 - DNA, 225 bp, Unknown
  Encodes 16S rRNA from Clostridium III
agagtttgatcatggctcaggacgaacgctggcggcgtgcctaacacatgcaagtcgaacggagttgttttggatgatgccttcgggtggattccgattcaacttagtggcggacgggcgagtaacgcgtgaataacctgcccataagaggggaataatccatggaaacgtggactaataccgcatattgtaacgaagtcgcatggctttgttatgaaagattta

SEQ ID NO: 981 - DNA, 225 bp, Unknown
  Encodes 16S rRNA from Methanobrevibacter
agagtttgatcatggcagatgctactgctattgggattcgattaagccatgcaagtcgaacgagtttaggctcgtggcgtacggctcagtaacacgtggataacctacccttaggactgggataaccctgggaaactggggataatactagataggcaatttttcctggaatggttttttgtttaaatgttttttcgcctaaggatgggtctgcggccgattagg

SEQ ID NO: 982 - DNA, 225 bp, Unknown
  Encodes 16S rRNA from Paraprevotella
agagtttgatcatggctcaggatgaacgctagcggcaggcttaacacatgcaagtcgaggggcagcgagtcggtagcaatactgatgtcggcgaccggcgcacgggtgagtaacgcgtatgcaacctttcccagacagggggatagcccagggaaacttggattaataccccgtaggccatggatgggcatccatctatggttaaagttccggcggtctggggtg

SEQ ID NO: 983 - DNA, 225 bp, Unknown
  Encodes 16S rRNA from Desulfobulbus
agagtttgatcctggctcagaacgaacgctggcggcgtgcttaacacatgcaagtcgaacgcgaaagcggcttcggtcgtgagtagagtggcgcacgggtgagtaacgcgtagataacctgtcttcatattcgggataacacgccgaaaggggtactaataccggatatactcgcatttcaataggtgaggcgaggaaaggtggcctctgattcaagctactgta

SEQ ID NO: 984 - DNA, 225 bp, Unknown
  Encodes 16S rRNA from Butyricicoccus
agagtttgatcctggctcaggacgaacgctggcggcgtgcctaacacatgcaagtcgaacggaactattttgaaggatctcttcggagtgacggatttttagtttagtggcgatcggtagccggactgagaggttgatcggccacattgggactgagacacggcccagactcctacgggaggcagcagtgggggatattgcgcaatgggggcaaccctgacgcag

SEQ ID NO: 985 - DNA, 225 bp, Unknown
  Encodes 16S rRNA from Clostridium XlVa
agagtttgatcctggctcaggatgaacgctggcggcgtgcctaacacatgcaagtcgagcggagatgcacattggatgaagattcgtccgaatcctggtgcatcttagcggcggatgggtgagtaacgcgtggacaacctgcccgcaacagggggataacagctggaaacggctgataataccgcatatgcacacggaaccgcatggttttgggtggaaagatta

SEQ ID NO: 986 - DNA, 225 bp, Unknown
  Encodes 16S rRNA from Dialister
agagtttgatcctggctcaggacgaacgctggcggcgtgcttaacacatgcaagtcgaacgggaggaaaagagaagcttgcttctttttgaatctagtggcaaacgggtgagtaacacgtaaacaacctgccttcaggatggggacaacagacggaaacgactgctaataccgaatgtgttccggagaccgcatgatttccggaagaaaggatggcctctattta

SEQ ID NO: 987 - DNA, 225 bp, Unknown
  Encodes 16S rRNA from Selenomonas
agagtttgatcatggctcaggacgaacgctggcggcgtgcttaacacatgcaagtcgaacgagacgattttaagcttgcttagatgagtcgagtggcaaacgggtgagtaacgcgtagacaacctgccgcaaagatggggacaacagtccgaaaggactgctaataccgaatgttgtatcgtttccgcatggagatgatattaaagatggcctctacttgtaagc

SEQ ID NO: 988 - DNA, 225 bp, Unknown
  Encodes 16S rRNA from Spirochaeta
agagtttgatcctggctcagaacgaacgctggcggcgcgtcttaagcatgcaagtcgagcggtaaggaggtagcttgctacttccctagagcggcggactggtgagtaacgcgtgggtgacgtaccctttggttggggatagccggtagaaataccgggtaataccgaataagacctctggtagaaagattagagaggaaagcggctccggccgcgccgaaggaa

SEQ ID NO: 989 - DNA, 225 bp, Unknown
  Encodes 16S rRNA from Clostridium IV
agagtttgatcatggctcaggacaaacgctggcggcatgcctaacacatgcaagtcgaacggagttcagttttagatcccttcggggtgacgaagcgaagacttagtggcggacgggtgagtaacgcgtgaggaacctgcctttcagagggggataacgtttggaaacgaacgctaataccgcataacacaaccgagtggcatcgcttggttgtcaaaggagcaa

SEQ ID NO: 990 - DNA, 225 bp, Unknown
  Encodes 16S rRNA from Cellulosilyticum
agagtttgatcatggctcaggatgaacgctggcggcgtgcataacacattcaagtcgaacggagttatttccttcgggggataacttagtggcggacgggtgagtaacgcgtgagtaacctgccatacacagggggataacgaccggaaacagtcgctaataccgcataacgcatgaaggtcacatggtctttatgccaaagatttatcggtgtatgatggactc

SEQ ID NO: 991 - DNA, 225 bp, Unknown
  Encodes 16S rRNA from Prevotella
agagtttgatcctggctcaggatgaacgctagctacaggcttaacacatgcaagtcgcggggcagcatggaggttgcttgcaacctctgatggcgaccggcgcacgggtgcgtaacgcgtatccaacctgccccttactctggaatagcccggcgaaagtcggattaatgccggatgttgtcagacgaggacatctgaatctgaccaaaggccctagggtcggta

SEQ ID NO: 992 - DNA, 225 bp, Unknown
  Encodes 16S rRNA from Pseudoflavonifractor
agagtttgatcatggctcaggacgaacgctggcggcgtgcttaacacatgcaagtcgaacgagaatcatatgacggagttttcggacaactgattatgaggaaagtggcggacgggtgagtaacgcgtgaggaacctgcctcggagtgggggataacacatcgaaaggtgtgctaataccgcataatgtatatcattcgcatgggagatataccaaagatttatt

SEQ ID NO: 993 - DNA, 225 bp, Unknown
  Encodes 16S rRNA from Clostridium III
agagtttgatcatggctcaggacgaacgctggcggcatgcctaacacatgcaagtcgaacggagatagtagagcttgctttacgatcttagtggcggacgggtgagtaacgcgtgagcaacctgcccttcagtggggaataatgttgagaaatcgacactaataccgcataaagtatcatgatcgcatggtcgagataccaaaggagcaattcgctgaaggatgg

SEQ ID NO: 994 - DNA, 225 bp, Unknown
  Encodes 16S rRNA from Oscillibacter
agagtttgatcctggctcaggacgaacgctggcggcgtgcttaacacatgcaagtcgaacgaagctctcacgcttgagttttcggacaagagggtgagaagacttagtggcggactggtgagtaacgcgtgagcaacctgccctccggtgggggacaacagttggaaacgactgctaataccgcataatgtacagagaccgcatgatctttgtaccaaagcttta

SEQ ID NO: 995 - DNA, 225 bp, Unknown
  Encodes 16S rRNA from Faecalibacterium
agagtttgatcatggctcaggatgaacgctggcggcgtgcataacacattcaagtcgaacggagttgcgatagaaagaggcttcggccaatggaaattgtaacttagtggcggacgggtgagtaacgcgtgagcaacctacctatgcgcgggggacaacagttggaaacgactgctaataccgcataaatcatgataaaggcatctttaacatggcaaagattaa

SEQ ID NO: 996 - DNA, 225 bp, Unknown
  Encodes 16S rRNA from Clostridium XlVb
agagtttgatcatggctcaggatgaacgctggcggcgtgcttaacacatgcaagtcgagcgaaggacaaagagcttgctttttgttacttagcggcggacgggtgagtaacgtgtgggcaatctgccctatgcagaggaataacatagagaaatttatgctaatgcctcataaactcttagaatcgcatggtttatagagaaaagatttatcggcataggaggag

SEQ ID NO: 997 - DNA, 225 bp, Unknown
  Encodes 16S rRNA from Eubacterium
agagtttgatcctggctcaggatgaacgctggcggcgtgcctaacacatgcaagtcgagcgagaaatcaggtgttgaaacttcggtagatacatctggtggacagcggcggacgggtgagtaacgcgtgggaaacctgcccttatctgagggatagccgagagaaatttcgagtaatacctcataatgcatcgagaccgcatggccatgatgccaaagatttatc

SEQ ID NO: 998 - DNA, 225 bp, Unknown
  Encodes 16S rRNA from Clostridium III
agagtttgatcatggctcaggacgaacgctggcggcgtgcctaacacatgcaagtcgaacggagccttttgccggaagggagcttgctccaggaaagtaaaagacttagtggcggacgggtgagtaacgcgtggataacctgccttagacagggggataacacagggaaacttgtgctaataccgcataagaccacactatggcatcatagaggggtcaaaggag

SEQ ID NO: 999 - DNA, 225 bp, Unknown
  Encodes 16S rRNA from Prevotella
agagtttgatcatggctcaggatgaacgctagctacaggcttaacacatgcaagtcgaggggcagcacggttgttgcttgcaacaactggtggcgaccggcgcacgggtgagtaacgcgtatccaacctgcccgcaaccgcggaatagcccgccgaaaggcggattaatgccgcatgagctcgcgcgagggcatcatttcgcgagcaaaggttcgttccggttgc

SEQ ID NO: 1000 - DNA, 225 bp, Unknown
  Encodes 16S rRNA from Paenibacillus
agagtttgatcctggctcaggatgaacgctggcggcgtgcctaatacatgcaagtcgaacggatgaggtagcaataccgattcagtggcgaacgggtgagtaacacgtaggtaacctgcccttaagactgggatacccaggcgaaagcttggctaataccggatatgagtagaagaggcatctcctttacttgaaagttgcgtttgcaacacttttggatggacc

SEQ ID NO: 1001 - DNA, 225 bp, Unknown
  Encodes 16S rRNA from Pedobacter
agagtttgatcatggctcaggatgaacgctagcggcaggcctaatacatgcaagtcgaacggtaaacgccccttcgggggtgtgagagtggcgcacgggtgcgtaacgcgtatgcaacccacccgctgccgggggatagcccggagaaatccgaattaataccccatgaggaggagatgaggcatctcatctttttcaaaacttcggtggcggcggacgggcatg

SEQ ID NO: 1002 - DNA, 225 bp, Unknown
  Encodes 16S rRNA from Butyricicoccus
agagtttgatcctggctcaggataaacgctggcggcgcacataagacatgcaagtcgaacgggaactttattgaagttatctgatataaagttctagtggcggactggtgagtaatgtataagcaacctgcctacaagaggggaataacagtgagaaatcattgctaataccgcataagctgtgagtatcgcatggtacaaacagaaaaggaagcaattctgctt

SEQ ID NO: 1003 - DNA, 225 bp, Unknown
  Encodes 16S rRNA from Clostridium XlVa
agagtttgatcatggctcaggatgaacgctggcggcgtgcctaacacatgcaagtcgaacggagtgttttaagccgattcttcggatgaagctttttacacttagtggcggacgggtgagtaacgcgtggagaacctgcctcacacagggggacagcagctggaaacggctgataataccgcatatgcccacgataccgcatggtattgcggggaaacatttatg

SEQ ID NO: 1004 - DNA, 225 bp, Unknown
  Encodes 16S rRNA from Roseburia
agagtttgatcatggctcaggatgaacgctggcggcgtgcctaacacatgcaagtcgaacggacccatggagatgattagcttgctatgaatttccggaaggttagtggcggacgggtgagtaacgcgtgggtaacctgcctcatacagggggatagcagttggaaacgactggtaataccgcataagcgcacagtaccgcatggtacagtgtgaaaagctccga

SEQ ID NO: 1005 - DNA, 225 bp, Unknown
  Encodes 16S rRNA from Hydrogenoanaerobacterium
agagtttgatcatggctcaggacgaacgctggcggcgtgcctaacacatgcaagtcgaacggactgataggagcttgctccttgaaagttagtggcggacgggtgagtaacgcgtgaggaacctgcctttcagagggggataacgtcttgaaaaggacgctaataccgcatgacaccggattgtcgcatggcagaccggtcaaaggagcaatccgctgaaagatg

SEQ ID NO: 1006 - DNA, 225 bp, Unknown
  Encodes 16S rRNA from Adhaeribacter
agagtttgatcctggctcaggatgaacgctggcggcaggcttaatacatgcaagtcgaacggtaaggccgagcgtagcaatacgcgaggtacacgagtggcgcacgggtgcgtaacgcgtatgcaacctgcccccttccgggacaaaacgtcgagaaattggcgctaatatcccatggcgacctcgggaggcatctctgggggtccaaagattcattggaagggg

SEQ ID NO: 1007 - DNA, 225 bp, Unknown
  Encodes 16S rRNA from Eubacterium
agagtttgatcatggctcaggattaacgctggcggcgtgcctaacacatgcaagtcgagcgagaattaggaaaatgatgcttcggttgattttttctaaggacagcggcggacgggtgagtaacgcgtgggcaacctgcccctttccggaggatagccaagggaaactttgaataatactccataaagcaagagtaccgcatgatacacttgccaaagatttatc

SEQ ID NO: 1008 - DNA, 225 bp, Unknown
  Encodes 16S rRNA from Bacteroides
agagtttgatcctggctcaggatgaacgctagctacaggcttaacacatgcaagtcgaggggcagcattaggtcagcttgctgacctagatggcgaccggcgcacgggtgagtaacgcgtatccaacctgccccctacccggggatagccttgcgaaagtaagattaatacccggtgctgttatgtttccgcatgggaatataacgaaagattcatcggtagggg

SEQ ID NO: 1009 - DNA, 225 bp, Unknown
  Encodes 16S rRNA from Victivallis
agagtttgatcctggctcagaacgaacgctggcggcatggattaggcatgcaagtcgaacgaagcagcaatgcttagtggcggaagggtgaggaacgcgtgagtaatctgcccccaagttgggaataacagctggaaacggttgctaataccgaatgtggctgcctggtcgcatgatcgggcagttaaagatttattgcttggggatgagctcgcgtcccattag

SEQ ID NO: 1010 - DNA, 225 bp, Unknown
  Encodes 16S rRNA from Roseburia
agagtttgatcatggctcaggatgaacgctggcggcgtgcttaacacatgcaagtcgaacgaagttagattggaatgcggcttcggccaaaggaagatttaattgagtggcggacgggtgagtaacgcgtgggtaacctaccttacacagggggataacgattggaaacgatcgctaataccgcataagaccacagtaccgcatggtacaggggtaaaagaatta

SEQ ID NO: 1011 - DNA, 225 bp, Unknown
  Encodes 16S rRNA from Treponema
agagtttgatcctggctcagaacgaacgctggcggcgcgtcttaagcatgcaagtcgagcgggaatacctagcttgctaggtatgagagcggcggactggtgagtaacacgtagataacgcaccctctagacggggatagctgccagaaatggcagataataccggatgtgaacgtatgccgtgaaggtgtacgtggaaaggagcttcggctccgctagaggaac

SEQ ID NO: 1012 - DNA, 225 bp, Unknown
  Encodes 16S rRNA from Prevotella
agagtttgatcatggctcaggatgaacgctagctacaggcttaacacatgcaagtcgaggggcatcacggggttggcttgccatccctggtggcgaccggcgcacgggtgagtaacgcgtatccaacctgccccgaaccgcggtatagcccgccgaaaggcggattaatcccgcatgtggtcgtgagatgacatctgaccacgactaaaggtattttccggttcg

SEQ ID NO: 1013 - DNA, 225 bp, Unknown
  Encodes 16S rRNA from Prevotella
agagtttgatcatggctcaggatgaacgctagctacaggcttaacacatgcaagtcgaggggcagcactgggtgcgcttgcgcaccctggtggcgaccggcgcacgggtgagtaacgcgtatccaacctgcccgcaaccgcggaatagcccgccgaaaggcggattaatgccgcatgagctcgcgcgatggcatcttatcgcgagcaaaggtgttttccggttgt

SEQ ID NO: 1014 - DNA, 225 bp, Unknown
  Encodes 16S rRNA from Hydrogenoanaerobacterium
agagtttgatcatggctcaggacgaacgctggcggcgcgcctaacacatgcaagtcgaacgggactagtgaccggagattagagcttgttgttctagtttgcgatcactagttcagtggcggacgggtgagtaaagcatgagcaacctgcctagtagagggggatagcttttggaaacagaagataataccgcatgaatcagagatttcgcatgagatttttgga

SEQ ID NO: 1015 - DNA, 225 bp, Unknown
  Encodes 16S rRNA from Clostridium XlVa
agagtttgatcatggctcaggatgaacgctggcggcgtgcctaacacatgcaagtcgaacgagggtcctaaacctgagattcgtcgaaggggaaggaattccgagtggcggatgggtgagtaacgcgtggagaacctgccctttgctgggggataacaactggaaacggttgacaataccgcataagctcgatggaccgcatgatctatcgaggaaagatttatc

SEQ ID NO: 1016 - DNA, 225 bp, Unknown
  Encodes 16S rRNA from Bacteroides
agatttgatcctggctcaggatgaacgctagctacaggcttaacacatgcaagtcgaggggcagcatggtcttagcttgctaaggccgatggcgaccggcgcacgggtgagtaacgcgtatccaacctgccgtccagtaggggacagcccgtagaaatgcggattaataccctatgttctccgaggatgacatcagattcggagtaaagattcatcgctggacga

SEQ ID NO: 1017 - DNA, 155 bp, Unknown
  Encodes 16S rRNA from Bacteroides
agagtttgatcctggctcaggatgaacgctagctacaggcttaacacatgcaagtcgaggggtaacgcgaggaagacagcacgtaaataaacgtgttatttgacgttagagtgtgaataagcaccggcaaactccgtgccagcagccgcggtaat

SEQ ID NO: 1018 - DNA, 225 bp, Unknown
  Encodes 16S rRNA from Lactobacillus
agagtttgatcctggctcaggatgaacgctggcggcgtgcctaatacatgcaagtcgaacgagattttattaattgattacttcggtatgatttttctaaaatcgagtggcggacgggtgagtaacacgtgggtaacctgcccttaagtaggggataacatttggaaacagatgctaataccgtataaatctcagaaacacatgtttctgagctgaaaggcggct

SEQ ID NO: 1019 - DNA, 225 bp, Unknown
  Encodes 16S rRNA from Adlercreutzia
agagtttgatcctggctcaggatgaacgctggcggcgtgcctaacacatgcaagtcgaacggttaagccggcttcggccgggtatacagtggcgaacgggtgagtaacacgtgaccaacctgccccgcgctccgggacaaccgctggaaacggcggctaataccggatactcccgcctccccgcatggggcggcggggaaagccccgacggcgcgggatggggtc

SEQ ID NO: 1020 - DNA, 225 bp, Unknown
  Encodes 16S rRNA from Dethiosulfovibrio
agagtttgatcatggctcaggatgaacgctggcggcgtgcttaacacattcaagtcgaacggagtgtttttgaaagcttgcttttgagaatacttagtggcggacgggtgagtaatgcatgagcaacctgcctttaagagggggataacacagagaaatctgtgctaataccgcatagaacactgagatggcatcatcatagtgggaaaggagcaatccgcttaa

SEQ ID NO: 1021 - DNA, 225 bp, Unknown
  Encodes 16S rRNA from Lutispora
agagtttgatcatggctcaggacgaacgctggcggcgtgcttaaaacatgcaagtcgaacggagattttagggagcttgcttcttgaaatcttagtggcggacgggtgagtaacacgtgagcaacctgcctatcacagggggataacacttagaaataggtgctaataccgcatatgaccacagaccggcatcggtcagaggtgaaaggagttaaatctggtgat

SEQ ID NO: 1022 - DNA, 225 bp, Unknown
  Encodes 16S rRNA from Turicibacter
agagtttgatcctggctcaggatgaacgctggcggcgtgcctaatacatgcaagtcgaacggagcacttcggtgcttagtggcgaacgggtgagtaacacataaacaatctacccttaagtctgggataacggttggaaacgaccgctaataccggataggtaaaaccgaggcatcttggttttattaaagctgggctacagcgctaaaggatgagtttatgtcg

SEQ ID NO: 1023 - DNA, 225 bp, Unknown
  Encodes 16S rRNA from unknown taxa
agagtttgatcctggctcaggacgaacgctggcggtgtgcctcatacatgcaagtcgaacgataaggttccttcgggaatacataagtggcggacgggtgagtacaacataggaaatctgccctaaactgggggacaacagagggaaactcctgctaataccccatacgagcttggttgaaataccaatcttgaaagctccggcggtttgggatgagcctgtgcc

SEQ ID NO: 1024 - DNA, 225 bp, Unknown
  Encodes 16S rRNA from Clostridium sensu stricto
agagtttgatcatggctcaggacgaacgctggcggcatgcctaacacatgcaagtcgaacggaggtggaaacaccttagtggcgaacgggtgagtaacgcgtgagtaacctgccttatacacagggataccagttagaaatgactgctaataccggataagaccacagtccggcatcggacaggggtcaaagtgaattagcggtataagatgggctcgcgtccaa

SEQ ID NO: 1025 - DNA, 225 bp, Unknown
  Encodes 16S rRNA from unknown taxa
agagtttgatcatggctcaggatgaacgctggcggcgtgcttcatacatgcaagtcgaacgtgaagctgacttcggtcagtggaaagtggcggacgggtgagtaatacataggaaatctgcccttaggaaggggataacagtcggaaacgattgctaataccctatatgagcttggttgcaataccaatcttgaaaactccggtgcctaaggatgagcctgtgcc

SEQ ID NO: 1026 - DNA, 225 bp, Unknown
  Encodes 16S rRNA from Bulleidia
agagtttgatcatggctcaggatgaacgctggcggcgtgcctaatacatgcaagtcgaacgagagcgaccagcttgctggtcaatcgagtggcgaacgggtgagtaacacataaacaatctgccctggagactgggataacgtagggaaacccacgctaataccggataggcagtaaggggacatccccatactgttaaagctgggctacagcactgcaggatga

SEQ ID NO: 1027 - DNA, 225 bp, Unknown
  Encodes 16S rRNA from Aquiflexum
agagtttgatcatggctcaggatgaacgctggcggcaggcttaatacatgcaagtcgaacggtaaggccgagcgtagcaatacgcgaggtacacgagtggcgcacgggtgcgtaacgcgtatgcaacctgcccccttccgggacaaaacgtcgagaaattggcgctaatatcccatggcgacccttgggggcatccccgggggtccaaagattcattggaagggg

SEQ ID NO: 1028 - DNA, 225 bp, Unknown
  Encodes 16S rRNA from Lachnospiracea incertae sedis
agagtttgatcctggctcaggatgaacgctggcggcgtgcttaacacatgcaagtcgaacgaagcacttattgagaaccttcgggtgatcggcaagtgactgagtggcggacgggtgagtaacgcgtgggtaacctgccctgtacagggggataacagccagaaatggctgctaataccgcataagcccgggggggagcattttctcccggggaaaactccggtg

SEQ ID NO: 1029 - DNA, 225 bp, Unknown
  Encodes 16S rRNA from Lachnospiracea incertae sedis
agagtttgatcctggctcaggatgaacgctggcggcgtgcttaacacatgcaggtcgaacgaagccccggaagcggatcttcggaaaagcggacgggagacttagtggcggacgggtgagtaacgcgtgggcaacctgcccttgggagggggacaacagccggaaacggctgctaataccgcatgatccggcggctccgcatgggggtgccgggaaaggagcgat

SEQ ID NO: 1030 - DNA, 225 bp, Unknown
  Encodes 16S rRNA from Clostridium III
agagtttgatcctggctcaggataaacgctggcggcgcacataagacatgcaagtcgaacgaacgagtacagattctttacgtttttgtatgagttagtggcggactggtgagtaacgcgtgagcaacctgcctataagaggggaataacggagagaaattttcgctaataccgcataagctgatagagtcgcatgacttagtcagaaaaggagcaatccgctta

SEQ ID NO: 1031 - DNA, 225 bp, Unknown
  Encodes 16S rRNA from Roseburia
agagtttgatcatggctcaggatgaacgctggcggcgtgcttaacacatgcaagtcgaacggacttaccctggatgaggccctcgggcggattcctaagtaagttagtggcggacgggtgagtaacgcgtgggtaacctgcctcacattgggggataacgattggaaacgatcgctaataccgcataagaccacggcaccgcatggtgctgaggtaaaaactccg

SEQ ID NO: 1032 - DNA, 225 bp, Unknown
  Encodes 16S rRNA from Glaciecola
agagtttgatcatggctcaggatgaacgctggcggcgtgcctaacacatgcaagtcgaacgggactatttggggaatattgcacaatgggggaaaccctgatgcagccatgccgcgtgtgtgaagaaggccttcgggttgtaaagcacttttgcattcgaggaagacagcgtataaacaaatgcgctatttgacgttagagtgtgaataagcaccggcaaactcc

SEQ ID NO: 1033 - DNA, 225 bp, Unknown
  Encodes 16S rRNA from Clostridium XlVa
agagtttgatcatggctcaggatgaacgctggcggcgtgcttaacacatgcaagtcgaacgaggaattaacattgaaattttcggatggatttgttttttccgagtggcggacgggtgagtaacgcgtgggtaacctgccttacacagggggacaacagccggaaacggctgctaataccgcataacctgctagagtcgcatgactcagacagaaaagatttatc

SEQ ID NO: 1034 - DNA, 225 bp, Unknown
  Encodes 16S rRNA from Hydrogenoanaerobacterium
agagtttgatcatggctcaggagaaacgctggcggcgcacataagacatgcaagtcgaacggaaccaagtcgaatgtttacatgagacggaagtttagtggcggacgggtgagtaacacgtgagcaacctgcctttaagagggggataacattgagaaatcagtgctaataccgcataaagcatctttaccgcatgatagagatagccaaaggagaaatccgctt

SEQ ID NO: 1035 - DNA, 225 bp, Unknown
  Encodes 16S rRNA from Clostridium IV
agagtttgatcctggctcaggatgaacgctggcggcgtgcataacacattcaagtcgaacgaagcaccggcgaggaagtcttcggacggaattgcccttgacttagtggcggacgggtgagtaacgcgtgagcaaccttcctggcagtgagggataacacagggaaacttgtgctaataccgcatgacgcacgattgtcgcatggcagacgtgccaaagattaat

SEQ ID NO: 1036 - DNA, 225 bp, Unknown
  Encodes 16S rRNA from Sphaerobacter
agagtttgatcatggctcaggataaacgctggcggcgtgcctaatgcatgcaagtcggacgggagccccttcgggggtcgaccgtggcggacgggtgaggaacacgtggctaacctgcccatcagtgggggataactccgggaaaccggagctaagaccgcatacgttcagtttcggggacggaattgaggaaagctttcgagcgctgatggagggggctgcggc

SEQ ID NO: 1037 - DNA, 225 bp, Unknown
  Encodes 16S rRNA from unknown taxa
agagtttgatcctggctcaggacgaacgctggcggcgtgcttcatacatgcaagtcgaacgataaggtctcttcggagacacataagtggcggacgggtgagtaatgtgtagagaatctgccctttagtgggggacaacagttggaaacgactgctaataccgcatatgcgcgtacctgtaatggtattcgtgaaaactccggtgctaaaggatgagtctgcatc

SEQ ID NO: 1038 - DNA, 225 bp, Unknown
  Encodes 16S rRNA from Prevotella
agagtttgatcctggctcaggatgaacgctagctacaggcttaacacatgcaagtcgaggggcagcatgtcggtggcttgccaccggcgatggcgaccggcgcacgggtgagtaacgcgtatccaacctgccctcaaccgcggaatagcccgccgaaaggcggattaatgccgcatgagctcgcgcgggggcatctgcccgcgagcaaaggtttgttccggttgg

SEQ ID NO: 1039 - DNA, 225 bp, Unknown
  Encodes 16S rRNA from Turicibacter
agagtttgatcctggctcaggatgaacgctggcggcgtgcctaatacatgcaagtcgaacgagatagcaatatcgagtggcgaacgggtgagtaacacgtaggtaacctgccttacagtttgggataccctggcgaaagctaggctaataccgaataattggattggaggcatctccgatctctaaaaggggcccttaaagcctcgctgaatgatggacctgcgg

SEQ ID NO: 1040 - DNA, 225 bp, Unknown
  Encodes 16S rRNA from Ruminococcus
agagtttgatcatggctcaggacgaacgctggcggcacgcttaacacatgcaagtcgaacggagatcattctttcggggatgatcttagtggcggacgggtgagtaacacgtgagcaacctgccttacggagaggaataatgattggaaacgatcactaataccacataacatataggtgatgcatatcagctatatcaaagatttatcgccgtaagatgggctc

SEQ ID NO: 1041 - DNA, 225 bp, Unknown
  Encodes 16S rRNA from Clostridium IV
agagtttgatcatggctcaggattaacgctggcggcgtgcataacacattcaagtcgaacggagaaggggcttcggccccggatcagtggcggacgggtgagtaacgcgtgagtaacctgcctgtgtgaggggaataacagatcgaaaggcctgctaataccgcatgacgtacgactgtcgcatggcagaggtaccaaagatttatcgcacacagatggactcgc

SEQ ID NO: 1042 - DNA, 225 bp, Unknown
  Encodes 16S rRNA from Clostridium XlVa
agagtttgatcatggctcaggatgaacgctggcggcgcgcataacacatgcaagtcgaacggagtgtaattgaaacctagtgattttacacttagtggcggacgggtgagtaacgcgtgggtaacctgcctggtattgggggacaacagttagaaatgactgctaataccgcatacgacgtcggggaggcatctccctgacgggaaaggaattatccgatatcag

SEQ ID NO: 1043 - DNA, 225 bp, Unknown
  Encodes 16S rRNA from Saccharofermentans
agagtttgatcatggctcaggacgaacgctggcggcgtgcctaacacatgcaagtcgagcggaactgattctggaaagcttcggccggaagggatgagtttagcggcggacgggtgagtaacgcgtgagcaacctgtccttcacagggggataagacagcgaaagttgttctaataccgcataggaccacgggtgggcatccatctggggtgaaaggagcaatcc

SEQ ID NO: 1044 - DNA, 225 bp, Unknown
  Encodes 16S rRNA from Clostridium XlVb
agagtttgatcctggctcaggatgaacgctggcggcgtgcttaacacatgcaagtcgaacgaagatatttaagatgaaggcttcggtctgatttttttatattcttagtggcggacgggtgagtaacgcgtgggcaacctgccctttactggggaataatcattggaaacgatgactaataccgcatgtcaccgaggactggcatctttcctcggaaaaaggagc

SEQ ID NO: 1045 - DNA, 225 bp, Unknown
  Encodes 16S rRNA from Ruminococcus
agagtttgatcatggctcaggacgaacgctggcggcacgcttaacacatgcaagtcgaacgaaaaagtttcaccgcagcttgctgcaccgaaactttttagtggcggacgggtgagtaacacgtgagcaatctgccttttagagggggataccagttggaaacgactgttaataccgcataacatatcgaaaccgcatgattttgatatcaaagatttatcgctg

SEQ ID NO: 1046 - DNA, 178 bp, Unknown
  Encodes 16S rRNA from Fibrobacter
agagtttgatcctggctcaggatgaacgctggcggcgcgcctaacacatgcaagtcgaacggaagaagcatttcggtgtgtaaaccactgtcgtgagggaataaggcgtcttctcggagacgttgaatgtacctcgaaaggaagcaccggcaaacttcgtgccagcagccgcggtaat

SEQ ID NO: 1047 - DNA, 225 bp, Unknown
  Encodes 16S rRNA from Proteiniclasticum
agagtttgatcatggctcaggacgaacgctggcggcgtgcttaacacatgcaagtcgtacggggtatagcaatatacctagtggcgaacgggtgagtaacacgtgagtaacctgccctatacagggggacaacagctggaaacggctgctaataccgcataagaccacagcaccgcatggtgcagaggtaaaaggctacggccggtataggatgggcttgcgtac

SEQ ID NO: 1048 - DNA, 225 bp, Unknown
  Encodes 16S rRNA from Anaeroplasma
agagtttgatcctggctcaggattaacgctggcggcgtgcctaatacatgcaagtcgaatggttagcttgctaaccatggcgaacgggtgagtaacacgtaggcaacctgtctataagacgaggataaccattggaaacgatggataatactggataggatattggaaggcatcttctaatatttaaagatttatcactaatagaggggcctgcggcgcattagc

SEQ ID NO: 1049 - DNA, 225 bp, Unknown
  Encodes 16S rRNA from unknown taxa
agagtttgatcctggctcaggacgaacgctggcggtgtgcctcatacatgcaagtcgaacgataaggttccttcgggaatacataagtggcggacgggtgagtacaacataggaaatctgccctaaagcgggggacaacagagggaaacttctgctaataccccatatgagcttggttgaaataccaatcttgaaagatttatcactttaggatgagcctgtgcc

SEQ ID NO: 1050 - DNA, 225 bp, Unknown
  Encodes 16S rRNA from Algoriphagus
agagtttgatcctggctcaggatgaacgctggcggcaggcctaatacatgcaagtcgcgcgggaattgccctttcgggggtgatgagagcggcggacgggtgcgtaacgcgtatgcaaccaacccccgacaggcggatagccggtggaaacgccggataatacgccatgaaccctttttggggcatcccagggaggggaaagcggagacgcggtcggggacgggc

SEQ ID NO: 1051 - DNA, 225 bp, Unknown
  Encodes 16S rRNA from Clostridium XlVa
agagtttgatcatggctcaggatgaacgctggcggcgtgcttaacacatgcaagtcgaacgaagcgtctcgcccgaagaagcgaagtgcttgcacggagtggattcaattgagacgacttagtggcggacgggtgagtaacgcgtgggtaacctgccgtatgcagggggacaacagttggaaacgactgctaataccgcataagcgcacggctcggcatcgagca

SEQ ID NO: 1052 - DNA, 225 bp, Unknown
  Encodes 16S rRNA from Howardella
agagtttgatcatggctcaggataaacgctggcggcgcacataagacatgcaagtcgaacggacttaacttctagcttgctagaagagcggttagtggcggactggtgagtaacacgtaagaaatctgcctatcagaggggaataacagtgagaaatcattgctaataccgcatatgccataatcatcgcatgatgatagtgggaaagaagcaattcgctgatag

SEQ ID NO: 1053 - DNA, 225 bp, Unknown
  Encodes 16S rRNA from Clostridium XlVa
agagtttgatcatggctcaggatgaacgctggcggcgtgcctaacacatgcaagtcgaacgggggcgttccgccggggaggcttcggccgaaccatggggcgcccgagtggcggacgggtgagtaacgcgtggacaacctgccccccaccggggaataacacctggaaacaggtgctaataccgcatgagccccagagcccgcatgggcactgggggaaagctcc

SEQ ID NO: 1054 - DNA, 225 bp, Unknown
  Encodes 16S rRNA from Barnesiella
agagtttgatcatggctcaggatgaacgctagcgacaggcctaacacatgcaagtcgaggggcagcgagaggaaagcttgctttctttgtcggcgaccggcgcacgggtgcgtaacgggtgtgcaatctgcccataatcggggcatagcctaacgaaagttggattaattccccatgtgctatggagaggcatctcttcgtagtgaaacgtaaggattatggttg

SEQ ID NO: 1055 - DNA, 225 bp, Unknown
  Encodes 16S rRNA from Clostridium IV
agagtttgatcctggctcaggacgaacgctggcggcgtgcctaacacatgcaagtcgagcggggactttacgacagatttgaagacttcggttgaatatgaagatgtaaagttctagcggcggacgggtgagtaacgcgtgagcaacctgtcccttacagggggataacacagcgaaagttgtactaataccgcatgagaccacagtatcacatggtacaggggt

SEQ ID NO: 1056 - DNA, 225 bp, Unknown
  Encodes 16S rRNA from Prevotella
agagtttgatcatggctcaggatgaacgctagctacaggcttaacacatgcaagtcgaggggcagcatgtcggtggcttgccaccggcgatggcgaccggcgcacgggtgagtaacgcgtatccaacctgcccacaacctccgaatagcccgccgaaaggcggattaatgcgggatgtggtctgaagaagacatctgaactagaccaaaggttttttccggttgt

SEQ ID NO: 1057 - DNA, 225 bp, Unknown
  Encodes 16S rRNA from Clostridium XlVa
agagtttgatcctggctcaggacgaacgctggcggcgtgcttaacacatgcaagtcgaacgaggataatgacttcggtcattattcgagtggcggacgggtgagtaacgcgtgagcaatctgtccttaagagggggataacaactggaaacagttgctaataccgcataagaccacggcttcacatggagctgaggtaaaagaagcaattcgcttaagggtgagc

SEQ ID NO: 1058 - DNA, 225 bp, Unknown
  Encodes 16S rRNA from Butyricimonas
agagtttgatcctggctcaggatgaacgctagcggcaggcttaacacatgcaagtcgaggggcagcgcggggtagcaatactctggcggcgaccggcggaagggtgcgtaacgcgtgagcaacttgcccgtcactgtgggataggcactggaaacggtgtgtaataccacgtaatacatttgctcgcatgggtggatgttgaaaggattaccggtgacggatggg

SEQ ID NO: 1059 - DNA, 225 bp, Unknown
  Encodes 16S rRNA from Blautia
agagtttgatcctggctcaggatgaacgctggcggcgtgcctaacacatgcaagtcgaacggagcttatttctgcggagatttcggtcaaagcgggtttaagtttagtggcggacgggtgagtaacgcgtggagaacctgccctgtaccgggggataacagccggaaacggctgctaataccgcataagcgcacgaaggcgcatgccttagtgtgaaaaactccg

SEQ ID NO: 1060 - DNA, 204 bp, Unknown
  Encodes 16S rRNA from Prevotella
agagtttgatcatggctcaggatgaacgctagctacaggctttggtcaatgggcgcgagcctgaaccagccaagtagcgtgcaggatgacggccctatgggttgtaaactgcttttatgcggggataaagttcactacgtgtagtgttttgtaggtaccgcatgaataaggaccggctaattccgtgccagcagccgcggtaat

SEQ ID NO: 1061 - DNA, 225 bp, Unknown
  Encodes 16S rRNA from Clostridium XlVa
agagtttgatcctggctcaggatgaacgctggcggcgtgcctaacacatgcaagtcgaacggggtacagacgctgtgagaagaagtgcttgcacggaatcaaacttgtttgtacctagtggcggacgggtgagtaacgcgtggaaaacctgcctcatacagggggataacaggaagaaattcctgctaataccgcataagcgcacaagagggcatcctcaggtgt

SEQ ID NO: 1062 - DNA, 225 bp, Unknown
  Encodes 16S rRNA from Blautia
agagtttgatcatggctcaggatgaacgctggcggcgtgcctaacacatgcaagtcgaacgggacttatcaggaaaaaagcttcggcagatggaatggtaagtctagtggcggacgggtgagtaacgcgtggggaacctgccctgtactgggggataacagtgagaaatcactgctaataccgcataagcgcacagtaccgcatggtacagtgtgaaaaactccg

SEQ ID NO: 1063 - DNA, 225 bp, Unknown
  Encodes 16S rRNA from Clostridium IV
agagtttgatcctggctcaggacgaacgctggcggcgcgcctaacacatgcaagtcgaacgggaaatatctgaaagcttgcttttggatatttttagtggcggacgggtgagtaacacgtgagcaacctgccttagagagggggataacgtctggaaacggacgctaataccgcataacatcacgatatggcatcgtattgtgatcaaaggagcaatccgcttta

SEQ ID NO: 1064 - DNA, 225 bp, Unknown
  Encodes 16S rRNA from Flavobacterium
agagtttgatcatggctcaggatgaacgctagcggcaggcttaacacatgcaagtcgaggggcagcatgagagcgtagcaatacattcttgatggcgaccggcgcaagggtgcgtaacgcgtgagcaacttgcccgcatcaggggcataatcggtggaaacgccgtctaactccccataacatacgaggtggcatcactttgtattgaaatccttggaggatgcg

SEQ ID NO: 1065 - DNA, 225 bp, Unknown
  Encodes 16S rRNA from Prevotella
agagtttgatcctggctcaggatgaacgctagctacaggcttaacacatgcaagtcgaggggcagcatgtcgtgtgcttgcacacgatgatggcgaccggcgcacgggtgagtaacgcgtatccaacctgcccatgaccccgggatagcccgctgaaaagcggattaacaccggatgcggtcgaacgaggacatctgatttcgaccaaagcttcggcggtcatgg

SEQ ID NO: 1066 - DNA, 225 bp, Unknown
  Encodes 16S rRNA from Clostridium XlVa
agagtttgatcctggctcaggatgaacgctggcggcgtgcctaacacatgcaagtcgaacggggttgtgcgctgaggaagcttcggcagaatcttgcacaacctagtggcggacgggtgagtaacgcgtggacaacctgcccctgcctgggggacaacagccggaaacggctgctaataccgcataagctctgttattcgcatgggaagcagaggaaaggagaga

SEQ ID NO: 1067 - DNA, 225 bp, Unknown
  Encodes 16S rRNA from Clostridium XlVa
agagtttgatcctggctcaggatgaacgctggcggcgtgcttaacacatgcaagtcgaacgaagcactggggatgaagttttcggacagaattccctttgacttagtggcggacgggtgagtaacgcgtgggtaacctgcctcacactgggggacaacagctggaaacggctgctaataccgcataagcgcacgaagccgcatggctatgtgtgaaaaactccgg

SEQ ID NO: 1068 - DNA, 225 bp, Unknown
  Encodes 16S rRNA from Eubacterium
agagtttgatcctggctcaggatgaacgctggcggcgtgcctaacacatgcaagtcgagcgagaaacttatgtgatgcgatttcggtcaaatcttttaagtggaaagcggcggacgggtgagtaacgcgtaggcaacctgcccttagcagggggatagccattggaaacgatgattaaaaccccataatacggatatatcacatgttaaatccgtcaaagattta

SEQ ID NO: 1069 - DNA, 225 bp, Unknown
  Encodes 16S rRNA from Butyricicoccus
agagtttgatcctggctcaggataaacgctggcggcgtgcataacacattcaagtcgaacggacgatacgagaaacttcggttttttgtaaagttagtggcggacgggtgagtaacacgtgagcaatctgcctttgattgggggataacgcagggaaacttgtgctaataccgcataaagtgccgaggacgcatgaccacggcaccaaagctccggcgatcaaag

SEQ ID NO: 1070 - DNA, 225 bp, Unknown
  Encodes 16S rRNA from Fluviicola
agagtttgatcatggctcaggatgaacgctagcggcaggcttaacacatgcaagtcgaggggtaacaggcggtagcaatactgtgctgacgaccggcgcacgggtgcgtaacgcgtatgcaacctaccttcaacagggggataagcgggagaaattctgtctaataccccatagagtctagagggcacatgttttttagactaaagccttggtggttggagatgg

SEQ ID NO: 1071 - DNA, 225 bp, Unknown
  Encodes 16S rRNA from Anaerovibrio
agagtttgatcatggctcaggacgaacgctggcggcgtgcttaacacatgcaagtcgaacggggcgaagaagagcttgctctttggagcctagtggcaaacgggtgagtaacgcgtaggcaacctgcccttcagatggggacaacacctcgaaaggggtgctaataccgaatgacgtatgctggtcgcatgaccggcataccaaaggccgggcaaccggtcactg

SEQ ID NO: 1072 - DNA, 225 bp, Unknown
  Encodes 16S rRNA from Blautia
agagtttgatcctggctcaggatgaacgctggcggcgtgcctaacacatgcaagtcgaacggatttcctaatgacagaggcttcggccaacgaagtttggaagttagtggcggacgggtgagtaacgcgtggagaacctgccctgtactgggggataacatcaggaaactggtgctaaaaccgcataagcgcacaagaccgcatggtcaagtgtgaaaaactccg

SEQ ID NO: 1073 - DNA, 225 bp, Unknown
  Encodes 16S rRNA from unknown taxa
agagtttgatcctggctcagaacgaacgctggtagcgtggattaggcatgcaagtcgaacgggatccgggaggtagcaatacttcctggtgagagtggcggattggggaggaacacgtgagcaacctgcctttgagtcggggaaaaccgttggaaacgacggctaataccggatgtggcgcccggagacatcttcggagcgctaaagggggccgcaaggctctcg

SEQ ID NO: 1074 - DNA, 225 bp, Unknown
  Encodes 16S rRNA from Clostridium sensu stricto
agagtttgatcctggctcaggacgaacgctggcggcatgcctaacacatgcaagtcgaacggaataagaatggttgtagcgatactttcgttcttatttagtggcgaacgggtgagtaacacgtgagcaacctgccttctactcagggataacagccggaaacggctgctaataccggataagaccacgccgaggcatctcggaggggtcaaagcgccttagcgg

SEQ ID NO: 1075 - DNA, 225 bp, Unknown
  Encodes 16S rRNA from Spirochaeta
agagtttgatcctggctcagaacgaacgctggcggcgcgtcttaagcatgcaagtcgagcggcaagctgccttcgggcagcctagagcggcggactggtgagtaacgcgtggatgacgcaccctcctgatcgggatagcctgtggaaacacagggtaataccggataagcccgcccgcgttggaggcgagcggggaaaggggctattgccccgctggaggagcgg

SEQ ID NO: 1076 - DNA, 225 bp, Unknown
  Encodes 16S rRNA from Clostridium XI
agagtttgatcatggctcaggatgaacgctggcggcgtgcttaacacatgcaagtcgaacggagacatgttttggaagttttcggatggaagagatatgtcttagtggcggacgggtgagtaacacgtaaacaatctgcctttgagagcgggacaacagatagaaatatttgctaataccgcataagaccacaggttcgcatgaactaggggtaaaaggggagca

SEQ ID NO: 1077 - DNA, 225 bp, Unknown
  Encodes 16S rRNA from Anaerovorax
agagtttgatcctggctcaggatgaacgctggcggcgtgcctaacacatgcaagtcgagcgagaaacctctttgaagatacttcggttgattctgtgaggcggaaagcggcggacgggtgagtaacgcgtaggcaacctgccccatgcagagggatagcctcgggaaaccgggattaaaacctcataatacggaagagagacatctctttttcgtcaaagattta

SEQ ID NO: 1078 - DNA, 225 bp, Unknown
  Encodes 16S rRNA from Roseburia
agagtttgatcctggctcaggatgaacgctggcggcgtgcttaacacatgcaagtcgaacgaatttctttcagaacgcggcttcggccaagggacggaagaagtgagtggcggacgggtgagtaacgcgtgggtaacctgcctcacattgggggataccagtcggaaacgactgctaataccgcataagaccccggcaccgcatggtgctgaggccaaaactccg

SEQ ID NO: 1079 - DNA, 225 bp, Unknown
  Encodes 16S rRNA from Mucilaginibacter
agagtttgatcatggctcaggatgaacgctagcggcaggcctaatacatgcaagtcgaacgggatgggccccttcgggggccctgagagtggcgcacgggtgcgcaacgcgtatgcaaccaacccccgacaggcggatagccggtggaaacgccggataatacgccatggttccggtggagggcatcctctactggataaagccgagaggcggtcggggacgggc

SEQ ID NO: 1080 - DNA, 225 bp, Unknown
  Encodes 16S rRNA from Clostridium XI
agagtttgatcctggctcaggatgaacgctggcggcatgcctaacacatgcaagtcgaacggagatagaaatatcttagtggcgaacgggtgagtaacacgtgagcaacctgccttgtacacagggataacagatggaaacatctgctaataccggataagaccacagaccggcatcggtcaggggtaaaagtgatttagcggtacaagatgggctcgcgtccaa

SEQ ID NO: 1081 - DNA, 225 bp, Unknown
  Encodes 16S rRNA from Lachnospiracea incertae sedis
agagtttgatcatggctcaggatgaacgctggcggcgtgcctaacacatgcaagtcgaacgaagctctgctgcggaactcttcggagggaaggagcggatgactgagtggcggacgggtgagtaacgcgtgggtaacctgccctgtacagggggacaacagttagaaatgactgctaataccgcataagcgtacggtgccgcatggcacagtgcgaaaaaccgag

SEQ ID NO: 1082 - DNA, 225 bp, Unknown
  Encodes 16S rRNA from Prevotella
agagtttgatcatggctcaggatgaacgctagctacaggcctaacacatgcaagtcgaggggcagcatggaggttgcttgcaacttccgatggcgaccggcgaatgggtgagtcacgcgtgtccaacctgcctccggcccggggatagcccttggaaatgaggattaagacccgataggtggcgcttccgcatggcggcgccatgaaacgagaccggagatgggg

SEQ ID NO: 1083 - DNA, 225 bp, Unknown
  Encodes 16S rRNA from Clostridium III
agagtttgatcctggctcaggacgaacgctggcggcgtgcctaacacatgcaagtcgaacgagaatttagtaaatgatttcttcggaatgattttgctaaaggaaagtggcggacgggcgagtaacgcgtgagtaacctgcccataagagggggataatccttggaaacgaggactaataccgcatattgtagctttaccgcatggtttagttatgaaagattta

SEQ ID NO: 1084 - DNA, 225 bp, Unknown
  Encodes 16S rRNA from Lachnospiracea incertae sedis
agagtttgatcctggctcaggataaacgctggcggcgtgcttaacacatgcaagtcgaacgaagcattttgccacgatcccttcggggtgacggcattctgacttagtggcggacgggtgagtaacgcgtggacaacctgccgcatgcagggggataacagccggaaacggctgctaataccgcataagcgcacagtgccgcatggcacggtgtgaaaaactttc

SEQ ID NO: 1085 - DNA, 225 bp, Unknown
  Encodes 16S rRNA from Coprococcus
agagtttgatcctggctcaggatgaacgctggcggcgtgcttaacacatgcaagtcgaacggagtttagcgcttccgaagcttcggcagaggattgttaaacttagtggcggacgggtgagtaacgcgtgggtaacctgccatgtacagggggataacacttagaaataggtgctaataccgcataagcgcacaggaccgcatggtccggtgtgaaaaactgagg

SEQ ID NO: 1086 - DNA, 225 bp, Unknown
  Encodes 16S rRNA from Acholeplasma
agagtttgatcctggctcaggatgaacgctggcggcgtgcctaatacatgcaagtcgaacgctaactttcgggttagagtggcgaacgggtgagtaacacgtaggtaacctgcccataagacgaggataactactggaaacggtagctaatactggatagtatatagagtcgcatggctttatatttaaagatgccttcaagcatcacttatggatggacctgcg

SEQ ID NO: 1087 - DNA, 225 bp, Unknown
  Encodes 16S rRNA from Clostridium III
agagtttgatcctggctcaggacgaacgctggcggcgtgcctaacacatgcaagtcgaacgagaatttagcaaatgatttcttcggaatgattttactaaaggaaagtggcggacgggcgagtaacgcgtgagtaacctgcccataagagggggataatccttggaaacggggactaataccgcatatagtaattttaccgcatggtttaattatgaaagattta

SEQ ID NO: 1088 - DNA, 225 bp, Unknown
  Encodes 16S rRNA from Lactobacillus
agagtttgatcctggctcaggatgaacgccggcggtgtgcctaatacatgcaagtcgaacgcgttggcccaactgattgaacgtgcttgcacggacttgacgttggtttaccagcgagtggcggacgggtgagtaacacgtaggtaacctgccccaaagcgggggataacatttggaaacagatgctaataccgcataacaatttgaatcgcatgattcaaattt

SEQ ID NO: 1089 - DNA, 225 bp, Unknown
  Encodes 16S rRNA from Clostridium IV
agagtttgatcatggctcaggacgaacgctggcggcgtgcttaacacatgcaagtcgaacgagaatcagtggaaagagttttcggacgatggaagctgaggaaagtggcggacgggtgagtaacgcgtgaggaacctgccttggagagggggacaacagccggaaacggctgctaataccgcatgacatatctgaatcgcatggtttggatatcaaagaattatc

SEQ ID NO: 1090 - DNA, 225 bp, Unknown
  Encodes 16S rRNA from Prevotella
agagtttgatcatggctcaggatgaacgctagctacaggcttaacacatgcaagtcgaggggcatcgggagggaagcttgctttccttgccggcgaccggcgcacgggtgagtaacgcgtatccaacctgccgcacagtaggggatagcccggagaaatccggattaataccctatgttctccgagtcagtcatctgaattggagcaaaggttcgccgctgtgcg

SEQ ID NO: 1091 - DNA, 225 bp, Unknown
  Encodes 16S rRNA from Bifidobacterium
agagtttgatcatggctcaggatgaacgctggcggcgtgcttaacacatgcaagtcgaacgggatcctgcgggctttgcttgcgggtgagagtggcgaacgggtgagtaatgcgtgaccaacctgccccatgctccggaatagctcctggaaacgggtggtaatgccggatgctcccgcgccccgcatggggtgtggggaaagctttcgtggcatgggatggggt

SEQ ID NO: 1092 - DNA, 225 bp, Unknown
  Encodes 16S rRNA from Adhaeribacter
agagtttgatcctggctcaggatgaacgctggcggcaggcttaatacatgcaagtcgaacggtaaggcccgaggtagcaataccgagggtacacgagtggcgcacgggtgcgtaacgcgtatgtaatctgcccctgaccggaacaaaacagctggaaacggctgctaatattccatggccatcttcccgggcatccgggaggatgtaaagattcattggtcgggg

SEQ ID NO: 1093 - DNA, 225 bp, Unknown
  Encodes 16S rRNA from Hydrogenoanaerobacterium
agagtttgatcatggctcaggagaaacgctggcggcgcacataagacatgcaagtcgaacggaatttagccgaatgtttacatgaggcgaagatttagtggcggacgggtgagtaacacgtgagcaacctaccttggagagggggataacattgagaaatcagtgctaataccgcataaaactaatttattgcatgatagattagtcaaaggagaaatccgctct

SEQ ID NO: 1094 - DNA, 225 bp, Unknown
  Encodes 16S rRNA from Acetivibrio
agagtttgatcctggctcaggacgaacgctggcggcgtgcttaacacatgcaagtcgaacgggacttcagggaacgaggcttcggccaagcgaactgaagtttagtggcggacgggtgagtaacgcgtgagtaacctgcctatcacagggggacaacagttggaaacgactgctaataccgcataacgtattttcggggcatcccggggataccaaaggagcaat

SEQ ID NO: 1095 - DNA, 225 bp, Unknown
  Encodes 16S rRNA from unknown taxa
agagtttgatcctggctcaggatgaacgctggcggcgtgcttcatacatgcaagtcgaacgagaaatggcagcttgctgccatggaaagtggcggacgggtgagtaatacatagggaatctgcccctagccgggggacaacagttggaaacgactgctaataccgcatatgagatagattgaaatatttatcttgaaaactccggtggctagggatgagcctgtg

SEQ ID NO: 1096 - DNA, 225 bp, Unknown
  Encodes 16S rRNA from Flammeovirga
agagtttgatcatggctcaggatgaacgctagcggcaggccttatacatgcaagtcgaggggtaacatggtgtagcaatacattgatgacgaccggcgtatgggtgagtaatacgtacgtaatctacctcatatagaagaataactcctagaaatgggaactaatgcttcatacagttttaaaaggaatcttttaaaatgaaagatttatcgatatgggatgagc

SEQ ID NO: 1097 - DNA, 225 bp, Unknown
  Encodes 16S rRNA from Dethiosulfovibrio
agagtttgatcatggctcaggatgaacgctggcggcgtgcttaacacattcaagtcgaacggagtattatcgggagcttgcttttgataatacttagtggcggacgggtgagtaatacatgagcaacctgcctttaagagggggataacacagagaaatttgtgctaataccgcatagaacactgagatggcatcatcatagtgggaaaggagcaatccgcttaa

SEQ ID NO: 1098 - DNA, 225 bp, Unknown
  Encodes 16S rRNA from Hippea
agagtttgatcctggctcaggacgaacgctggcggcgtgcctaacacatgcaagtcgagcgaattcttacagagtatcgtaagagttagcggcaaacgggtgagtaacacatgggaaacctcccttagaatggggaacatctccgtgaaaacggagctaataccgcataagaccacagtttggcatcaaacaggggtaaaagcagcaatgcgttctaagatggtc

SEQ ID NO: 1099 - DNA, 225 bp, Unknown
  Encodes 16S rRNA from Faecalibacterium
agagtttgatcctggctcaggataaacgctggcggcgcacataagacatgcaagtcgaacggacgaagttagaatctttacgtttttaactaagttagtggcggactggtgagtaacgcgtgaataacctacctattagaggggaataacgaagagaaattttcgctaataccgcataagctgataggaccgcatggtctagtcagaaaaggagtaatccgctaa

SEQ ID NO: 1100 - DNA, 225 bp, Unknown
  Encodes 16S rRNA from Spirochaeta
agagtttgatcatggctcagaacgaacgctggcggcgcgttttaagcatgcaagtcgcagggtaaaattttagcaatagaattgagactggcgaacgggtgagtaacacgtgaaaatctaccttgagatgggggatagccggtagaaatatcgggtaataccgcatatgccgagaggtgaaaggggcaactgctccgtcttgagatgagtttgcgtctgattaga

SEQ ID NO: 1101 - DNA, 225 bp, Unknown
  Encodes 16S rRNA from Brevundimonas
agagtttgatcatggctcagaatgaacgctggcggtatgcttaatacatgcaagtcgaacgagaaagttcagcaatggacgagtaaagtggcgtacgggtgagtaatatataggaatctacccagtaatgaggaataagcactggaaacggtgtctaataccacatactaccatttatttgggaaagggttaatggcaacattaacctgttattggatgagccta

SEQ ID NO: 1102 - DNA, 225 bp, Unknown
  Encodes 16S rRNA from Mucilaginibacter
agagtttgatcatggctcaggatgaacgctagcggcaggcctaatacatgcaagtcgaacgggatgggctccttcgggggccctgagagtggcgcacgggtgcgcaacgcgtatgcaaccaacccccgacaggcggatagccggtggaaacgccggataatacgccatggttccgtgggagggcatcctcctgaggataaagccgagaggcggtcggggacgggc

SEQ ID NO: 1103 - DNA, 225 bp, Unknown
  Encodes 16S rRNA from Hydrogenoanaerobacterium
agagtttgatcatggctcaggacgaacgctggcggcgcgcctaacacatgcaagtcgaacggaactagtgaccggagggtagagggatctatcttgcgatcactagttcagtggcggacgggtgagtaaaacatgagcaacctggctagtagagggggatagcttttggaaacagaagataataccgcatacatcagagatttcgcatgaagtttttggaaaagg

SEQ ID NO: 1104 - DNA, 225 bp, Unknown
  Encodes 16S rRNA from Asaccharobacter
agagtttgatcctggctcaggatgaacgctggcggcgtgcctaacacatgcaagtcgaacggttaacccgccttcgggcggtcataaagtggcgaacgggtgagtaacacgtgaccaacctgccccgcgctccgggacagcctcgcgaaagcgggattaataccggatgcaccgcacctttcgcatgatcggtgcgggaaagctccggcggcgcgggatggggtc

SEQ ID NO: 1105 - DNA, 225 bp, Unknown
  Encodes 16S rRNA from Clostridium IV
agagtttgatcctggctcaggatgaacgctggcggcgtgcataacacattcaagtcgaacgaagcatgtagacggaagttttcggatggaagtatatatgacttagtggcggacgggtgagtaacgcgtgagcaaccttcctgcctgtgagggataacacagggaaacttgtgctaataccgcatgacgcacagacatcgcatggtgagtgtgccaaagatttat

SEQ ID NO: 1106 - DNA, 225 bp, Unknown
  Encodes 16S rRNA from Mogibacterium
agagtttgatcatggctcaggatgaacgctggcggcgtgcctaatacatgcaagtcgagcgagaagccaatttgaagcgttttcggacaattctgtttggtggaaagcggcggacgggtgagtaacgcgtaggcaacctgcccttagcagagggatagccattggaaacgatgattaaaacctcataatgccggttttacacatgttggaccggccaaagattta

SEQ ID NO: 1107 - DNA, 225 bp, Unknown
  Encodes 16S rRNA from Clostridium IV
agagtttgatcctggctcaggacgaacgctggcggcgtgcctaacacatgcaagtcgaacggagttattagagtgaagttttcggatggagcgaagataacttagtggcggacgggtgagtaacgcgtgagtaacctgcccattagagggggataacgttctgaaaagaacgctaataccgcataatatatttagttcgcatgaactgaatatcaaaggagcaat

SEQ ID NO: 1108 - DNA, 225 bp, Unknown
  Encodes 16S rRNA from Oscillibacter
agagtttgatcatggctcaggacgaacgctggcggcgtgcctaacacatgcaagtcgaacgaagctccggaagggcgacttcggtcaaacggaaggaagacttagtggcgaacgggtgagtaacgcgtgaggaacctgcctttcagtgggggacaacagttggaaacgactgctaataccgcataacgtacggaggtcgcatgaccattgtaccaaagatttatt

SEQ ID NO: 1109 - DNA, 225 bp, Unknown
  Encodes 16S rRNA from Clostridium XlVa
agagtttgatcatggctcaggatgaacgctggcggcgtgcctaacacatgcaagtcgagcggagagacagcggagattcaatcgatgatctgcttcttcttagcggcggatgggtgagtaacacgtgggtaacctgccctgcactgggggataacagttggaaacgactgttaataccgcatatgcgcacgggaccgcatggtcctgggcggaaagatttatcgg

SEQ ID NO: 1110 - DNA, 225 bp, Unknown
  Encodes 16S rRNA from Faecalibacterium
agagtttgatcctggctcaggacgaacgctggcggcatgcctaacacatgcaagtcgaacggtctaagagataaatttttaatttatttcaaggatagtggcgaacgggtgagtaacgcgtgagcaacctaccttttagagggggataacgcttggaaacaggcgctaataccgcataagctccgagtattgagtgatacaaggagaaaaggaggaatccgctaa

SEQ ID NO: 1111 - DNA, 225 bp, Unknown
  Encodes 16S rRNA from Altererythrobacter
agagtttgatcctggctcagaacgaacgctggcggcatgcttaacacatgcaagtcgaacggtgttttctagtacttgtattaggaaacatagtggcaaacgggtgagtaacgcgtgggaatgtacccttaagtattggataacgtctggaaacggacgctaatacaatatacgctcgagagaggaaagagagatcgctgaaggagtagcccgcgttagattagg

SEQ ID NO: 1112 - DNA, 225 bp, Unknown
  Encodes 16S rRNA from Gelidibacter
agagtttgatcctggctcaggataaacgctagcggcaggcctaacacatgcaagtcgagcggtaacgggagtagcaatacttgccgacgagcggcggacgggtgagtaacgcgtatgcaacctaccctttattcagggatagccttccgaaaggaggattaatacctgatggttcatttgagaggcatcttgataatgataaagatttattgataaaggatgggc

SEQ ID NO: 1113 - DNA, 225 bp, Unknown
  Encodes 16S rRNA from Prevotella
agagtttgatcatggctcaggatgaacgctagctacaggcttaacacatgcaagtcgaggggcatcacgggattggtttcggccattcctggtggcgaccggcgcacgggtgagtaacgcgtatccaacctgcccgcaaccgcggaatagcccgccgaaaggcggattaatgccgcatgcgctcgcgcgctggcatctgatcgcgagcaaaggtttttccggttg

SEQ ID NO: 1114 - DNA, 225 bp, Unknown
  Encodes 16S rRNA from Anaerovorax
agagtttgatcatggctcaggatgaacgctggcggcgtgcctaacacatgcaagtcgagcgagaatctttgaagtagcttgctacggagaagaggacagcggcggacgggtgagtaacgcgtaggtaagctgccccttgcagaaggatagcctcgggaaactgggattaatacttcataaagcgttttcatcgcatggtgagaacgccaaagatctatcggcaag

SEQ ID NO: 1115 - DNA, 225 bp, Unknown
  Encodes 16S rRNA from Riemerella
agagtttgatcatggctcaggatgaacgctagcgggaggcctaacacatgcaagccgagcggtagaaagtagcttgctacttttgagagcggcgtacgggtgcggaacacgtgtgcaacctgcctttatctggggaatagcctttcgaaaggaagattaatgccccataacatattgattggcatcaattaatattgaaagctccggcggatagagatgggcacg

SEQ ID NO: 1116 - DNA, 225 bp, Unknown
  Encodes 16S rRNA from Sphingobacterium
agagtttgatcatggctcaggatgaacgctagcggcaggcctaatacatgcaagtcgaacgggatctactggtaagcttgcttattggtagtgagagtggcgcacgggtgcgtaacgcgtgagcaacctacccttgtcagggggatagcccggcgaaagtcggattaataccgcatgacatcattgagaggcatctttcggtgatcaaagatttatcggacaagg

SEQ ID NO: 1117 - DNA, 225 bp, Unknown
  Encodes 16S rRNA from Syntrophococcus
agagtttgatcatggctcaggatgaacgctggcggcgtgcctaacacatgcaagtcgaacgaggctctgatccccgatgattcgtctgaagggaaaggatgtccgagtggcggatgggtgagtaacgcgtggagaacctgccccctgctgggggataacaactggaaacggttgacaataccgcataagcgcttttgatcgcatgatctgaagcggaaagattta

SEQ ID NO: 1118 - DNA, 225 bp, Unknown
  Encodes 16S rRNA from Bacteroides
agagtttgatcatggctcaggatgaacgctagctacaggcttaacacatgcaagtcgaggggcatcgcggtgtagcaatacactggcggcgaccggcgcacgggtgagtaacacgtatccaacctgccttcagctcggggatagccctctgaaaggaggattaatacccgatgtggtttttcgcagacatctgcgtataattaaagatttatcggctgatgatgg

SEQ ID NO: 1119 - DNA, 225 bp, Unknown
  Encodes 16S rRNA from Papillibacter
agagtttgatcctggctcaggatgaacgctggcggcgtgcataacacattcaagtcgaacgaagcactttggcggaaccttcgggggaagctgatttgacttagtggcggacgggtgagtaacgcgtgagcaaccttcctgcttgtgagggataacacagggaaacttgtgctaataccgcatgacgcatagacatcgcatggtgactatgccaaagacatgttg

SEQ ID NO: 1120 - DNA, 225 bp, Unknown
  Encodes 16S rRNA from Butyricicoccus
agagtttgatcctggctcaggatgaacgctggcggcgtgcataacacattcaagtcgaacgggacttagagggcttgccctttaagtttagtggcggacgggtgagtaacgcgtgagtaacctacctacatgagagggataacacagggaaacttgtgctaataccacataacatactgaattcgcatgtatttagtatcaaagagcaatcgcatatagatggac

SEQ ID NO: 1121 - DNA, 225 bp, Unknown
  Encodes 16S rRNA from Clostridium IV
agagtttgatcatggctcaggatgaacgctggcggcgtgcctaacacatgcaagtcgaacggactgatttccttcgggaatgaaagttagtggcggacgggtgagtaacgcgtgaggaacctgccttacagagggggataacgataagaaattgtcgctaataccgcataacacctcacacccgcatgggtgaggggtcaaaggagcaatccgctgtaagatggc

SEQ ID NO: 1122 - DNA, 225 bp, Unknown
  Encodes 16S rRNA from Hydrogenoanaerobacterium
agagtttgatcatggctcaggacgaacgctggcggtatgcctaacacatgcaagtcgaacgggtgtgtaaagagcttgctctttatttcactagtggcggacgggtgagtaacgcgtgagtaatctgccttgaagtggggaataacatttggaaacaaatgctaataccgcgtaatatactttcttcgcatgaagtttgtatcatagtttttcgcttcaagatga

SEQ ID NO: 1123 - DNA, 225 bp, Unknown
  Encodes 16S rRNA from Marvinbryantia
agagtttgatcatggctcaggatgaacgctggcggcgtgcctaacacatgcaagtcgaacgaagaccccgaagcggagatttcggttgaagctaagggaggactgagtggcggacgggtgagtaacgcgtggataacctgccccatacagggggatagcagttggaaacgactgataataccgcataagcgcacgaggagacatctccctgtgtgaaaagaatta

SEQ ID NO: 1124 - DNA, 225 bp, Unknown
  Encodes 16S rRNA from Brevibacillus
agagtttgatcatggctcaggatgaacgctggcggcgtgcctaatacatgcaagtcgaacggagaggcctcgacggaaaggtgcttgcaccttgaagatgaggaatcttagtggcgaacgggtgagtaatacatgagcaacctacccctttgactgggataacattctgaaaaggatgctaataccggataattaatattgaggcatctcgatattattaaaggt

SEQ ID NO: 1125 - DNA, 225 bp, Unknown
  Encodes 16S rRNA from Clostridium IV
agagtttgatcctggctcaggataaacgctggcggcgtgcataacacattcaagtcgaacgaagcactttttcttgagacttcggtcaagagaggatttgacttagtggcggacgggtgagtaacgcgtgagcaacctgcctaccggtgcgggataacgtttggaaacggacgctaataccgcataacgcatagatatcgcatggtatttgtgccaaagattcat

SEQ ID NO: 1126 - DNA, 225 bp, Unknown
  Encodes 16S rRNA from Prevotella
agagtttgatcatggctcaggatgaacgctagcggcaggcttaacacatgcaagtcgaggggcatcgcggggtagcaatactctggcggcgaccggcgaaagggtgagtaacgcgtgagcaacatgcccttgggtgggggatagtcattggaaacgatgcgtaataccccgtacgacgagagaccgcatgatttttcgttaatagatttattgcccaaggattgg

SEQ ID NO: 1127 - DNA, 225 bp, Unknown
  Encodes 16S rRNA from Clostridium IV
agagtttgatcatggctcaggatgaacgctggcggcgtgcctaacacatgcaagtcgaacggaacttgagggcttgcccttaagtttagtggcggacgggtgagtaacgcgtgagtaacctgcctttgagaggggaataacttcccgaaagggatgctaataccgcataacacatagctgtcgcatggcagagatgtcaaagattttatcgctcaaagatggact

SEQ ID NO: 1128 - DNA, 225 bp, Unknown
  Encodes 16S rRNA from Aminobacter
agagtttgatcctggctcagaacgaacgctggcggcaggcttaacacatgcaagtcgagcgccccgcaaggggagcggcagacgggtgagtaacgcgtgggaatctaccttttgctacggaataactcagggaaacttgtgctaataccgtatgtgtccttcgggagaaagatttatcggcaagagatgagcccgcgttggattagctagttggtggggtaaagg

SEQ ID NO: 1129 - DNA, 225 bp, Unknown
  Encodes 16S rRNA from Sporotomaculum
agagtttgatcatggctcaggacgaacgctggcggcgtgcttaacacatgcaagtcgaacgggcgacccttctacggaaggggagctagtggcggacgggtgagtaacgcgtgagcaaccaacccataagagggggataacaacgggaaaccgttgctaataccgcataagaccaagacagcgcatgctgaaggggtcaaaggagtaatccgcttatggacgggc

SEQ ID NO: 1130 - DNA, 225 bp, Unknown
  Encodes 16S rRNA from Clostridium IV
agagtttgatcatggctcaggacgaacgctggcggcgcgcctaacacatgcaagtcgaacggagagcgtgttttgaattcttcggaaggaaagatacgtttcttagtggcggacgggtgagtaacacgtgagcaacctgccttgcagagagggataacgattggaaacgatcgctaataccacataacatatggatatcgcatggtgaccatatcaaagatttat

SEQ ID NO: 1131 - DNA, 225 bp, Unknown
  Encodes 16S rRNA from Pedobacter
agagtttgatcctggctcaggatgaacgctagcggcaggcctaacacatgcaagtcgaggggcagcgcggggtagcaataccctggcggcgaccggcggatgggtgcgtaacgcgtatgcaacctgcctcggacaggaggataaccctgggaagctgggactaatactccgtatgacgagacctcgcatggggtcttgttgaaagccttggtggtccgagatggg

SEQ ID NO: 1132 - DNA, 225 bp, Unknown
  Encodes 16S rRNA from Victivallis
agagtttgatcatggctcagaatgaacgctggcggcatggattaggcatgcaagtcgaacggggcgcagcgatgcgcccagtggcgaaagggtgagtagcacgtgaagaacctgcccccggatccggaacaagcgctggaaacggcgtctgatacgggatgtggacgcggcccgcatgggccgcgctctaaagattcatcgtccggggagggcttcgcgtcccat

SEQ ID NO: 1133 - DNA, 225 bp, Unknown
  Encodes 16S rRNA from Gelidibacter
agagtttgatcatggctcaggataaacgctagcggcaggcctaacacatgcaagtcgagcggtaacgggagtagcaatacttgccgacgagcggcggacgggtgagtaacgcgtatgcaacctaccctttattcagggatagccttccgaaaggaggattaatacctgatagtactcaatgagggcatccaaagtgagttaaagatttattgataaaggatgggc

SEQ ID NO: 1134 - DNA, 225 bp, Unknown
  Encodes 16S rRNA from Prevotella
agagtttgatcatggctcaggatgaacgctagctacaggcttaacacatgcaagtcgaggggcagcatggctgttgcttgcaacagccgatggcgaccggcgcacgggtgagtaacgcgtatccaacctgccccataccgcggcacagcccggagaaatccggattaactccgcatgcggtcctttgatggcatcagtttaggaccaaacgttcagggtatggga

SEQ ID NO: 1135 - DNA, 225 bp, Unknown
  Encodes 16S rRNA from Wautersiella
agagtttgatcctggctcaggatgaacgctagcgggaggcttaacacatgcaagccgaggggtagagatagcttgctattttgagaccggcgcacgggtgcgtaacgcgtatgcaacttgccctattgaaagggatagcccagagaaatttggattaataccttataataaatttcattgcatgatgagattttgaaagatttatcgcagtaggataggcatgcg

SEQ ID NO: 1136 - DNA, 225 bp, Unknown
  Encodes 16S rRNA from Slackia
agagtttgatcctggctcaggatgaacgctggcggcgtgcctaacacatgcaagtcgaacggttaaaccggcttttagccggacataaagtggcgaacgggtgagtaacacgtgaccaacctgccccccgcaccgggacaacgggcggaaacgcccgctaataccggatactccgggcgccggcgcatgccggccccgggaaagcccaggcggcgggggatgggg

SEQ ID NO: 1137 - DNA, 225 bp, Unknown
  Encodes 16S rRNA from Pyramidobacter
agagtttgatcctggctcaggacgaacgctggcggcgtgcttaacacatgcaagttgggcgaggatggtttgaggagacatatgttgaattgaatcgttcgagcagcggacgggtgagtaaagcacaaggacttgtccgaaagagagggacaccttcgggaaaccggagctaatacctcataagccggaaggtgaaaagcagagatgcgcttttggagagacttg

SEQ ID NO: 1138 - DNA, 225 bp, Unknown
  Encodes 16S rRNA from Lachnospiracea incertae sedis
agagtttgatcatggctcaggatgaacgctggcggcgtgcttaacacatgcaagtcgaacggactttgctcgctgaaaaaggaaggtgcttgcacctgagagtttcttgaggaaagttagtggcggacgggtgagtaacgcgtgggtaacctgcctatcacagggggataacagttggaaacgactgctaataccgcataagcgcacggtatcgcatgatacagt

SEQ ID NO: 1139 - DNA, 225 bp, Unknown
  Encodes 16S rRNA from Clostridium XlVa
agagtttgatcctggctcaggatgaacgctggcggcgtgcttaacacatgcaagtcgaacggggtacagacgctgaagagtggagtgcttgcacaaagcgattcttgtttgtacctagtggcggacgggtgagtaacgcgtgggtaacctgccatacacagggggacaacagttggaaacgactgctaataccgcatatgcacacagtgaggcatctcacagggt

SEQ ID NO: 1140 - DNA, 225 bp, Unknown
  Encodes 16S rRNA from Prevotella
agagtttgatcatggctcaggatgaacgctagctacaggcttaacacatgcaagtcggggggcagcacgggaagcagcaatgcttttgggtggcgaccggcgaatgggtgagtaacgagtatccaacctgccccgtgctccgggacagccccgcgaaagcgggattaataccggatggtgcgtatgttccgcatgggatatacgtcaaagattcatcggcacggg

SEQ ID NO: 1141 - DNA, 225 bp, Unknown
  Encodes 16S rRNA from Lentisphaera
agagtttgatcctggctcagaatgaacgctggcggcatggattaggcatgcaagtcgaacgccccgggcttgcccggggagtggcgaaagggtgcgcaacgcgtggggaacccgcccccgggcccgggacaagcgctggaaacggcgtctgatacgggatgtcgagccgggccgcatggcccggcgtcgaaagattcatcgcccggggagggccccgcgtcccat

SEQ ID NO: 1142 - DNA, 225 bp, Unknown
  Encodes 16S rRNA from Desulfoluna
agagtttgatcatggctcagaatgaacgctggcggcgtgcctcaggcatgcaagtcgaacgagaaagttccttcggggatgagtatagtggcgcacgggtgagtaatacttaggtaacgtaccttttcgctggggatagctaggggaaactttagataataccgaatatatccatttttactgcggtttaaatggagaaagccgtaaggcgcgaagagagcggcc

SEQ ID NO: 1143 - DNA, 225 bp, Unknown
  Encodes 16S rRNA from Clostridium III
agagtttgatcctggctcaggacgaacgctggcggcgtgcttcatacatgcaagtcgaacgagaatctctggcttgccagagaggaaagtggcggacgggtgagtaatatgtagagaatctgccctagagagtgggacaacagagggaaacttctgctaataccgcatatgcgcgtagctgagatgctattcgtgaaaactccggtgctctgggatgagtctgca

SEQ ID NO: 1144 - DNA, 225 bp, Unknown
  Encodes 16S rRNA from Clostridium sensu stricto
agagtttgatcatggctcaggacgaacgctggcggcgcgcctaacacatgcaagtcgaacgggactagtgactggagctaagaagttttcttggttgcattcactagttcagtggcggacgggtgagtaaagcatgagtaacttgcccattagtggggaatagcttttggaaacagaagataataccgcatacatcggtttggacacatgttcggaccggaaaag

SEQ ID NO: 1145 - DNA, 225 bp, Unknown
  Encodes 16S rRNA from Prevotella
agagtttgatcctggctcaggatgaacgctagctacaggcttaacacatgcaagtcgaggggcagcacggggactgcttgcagttcccggtggcgaccggcgcacgggtgagtaacgcgtatccaacctgcccgcaactgcggaatagcccgccgaaaggcggattaatgccgcatgagctcgcgcgagggcatcatttcgcgagcaaaggttcattccggttgc

SEQ ID NO: 1146 - DNA, 225 bp, Unknown
  Encodes 16S rRNA from Clostridium III
agagtttgatcatggctcaggacgaacgctggcggcgtgcctaacacatgcaagtcgaacggagttattgcgattgatcccttcggggtgacgttgttctaacttagtggcggacgggcgagtaacgcgtgaataacctgcccataagaggggaataatccatggaaacgtggactaataccgcatattgtaattttatcgcatggtttaattatgaaagattta

SEQ ID NO: 1147 - DNA, 225 bp, Unknown
  Encodes 16S rRNA from Clostridium IV
agagtttgatcatggctcaggatgaacgctggcggcgtgcataacacattcaagtcgaacgaagcactgacgatgaagtcttcggatggaattgtctttgacttagtggcggacgggtgagtaacgcgtgagcaaccttcctggcagtgagggataacacagggaaacttgtgctaataccgcatgacgcacgggaatcgcatggttttagtgccaaagatttat

SEQ ID NO: 1148 - DNA, 225 bp, Unknown
  Encodes 16S rRNA from Prevotella
agagtttgatcatggctcaggatgaacgctagctacaggcctaacacatgcaagtcgaggggcagcatgagggtagctcgctacctttgatggcgaccggcgaatgggtgagtcacgcgtgtccaacctgcctccggcccggggatagcccttggaaatgaggattaagacccgataggtggcgcttccgcatggcggcgccatgaaactggaccggagatgggg

SEQ ID NO: 1149 - DNA, 225 bp, Unknown
  Encodes 16S rRNA from unknown taxa
agagtttgatcctggctcaggacaaacgctggcggcgtgcctaatacatgcaagtcgaacgagaatcaggagcttgctcctgaggaaagtggcggacgggtgagtaatatgtaggaaatctgcccttaggagggggacaacagttggaaacgactgctaataccccatatgagcgtagctgaaatgctattcttgaaatgatttttcgcctaaggatgagcctgc

SEQ ID NO: 1150 - DNA, 225 bp, Unknown
  Encodes 16S rRNA from Helicobacter
agagtttgatcatggctcagagttaacgctggcggcgtgcctaacacatgcaagtcgagcgaattcttacagagtatcgtaagagttagcggcaaacgggtgagtaacacatgggaaaccttccttagaaaggggaacacctccgtgaaaacggagttaataccgcataagaccacagtttggcatcgaacaggggtaaaagcagcaatgcgttctaagatggtc

SEQ ID NO: 1151 - DNA, 225 bp, Unknown
  Encodes 16S rRNA from Clostridium XlVa
agagtttgatcctggctcaggatgaacgctggcggcgtgcttaacacatgcaagtcgaacggagataagctctgatgaagcttcggcagaatcttgcttatcttagtggcggacgggtgagtaacgcgtgggtaacctacctgcaacagggggataacgattggaaacgatcgctaataccgcataacccgctagagtcgcatgactcagacggaaaagatttat

SEQ ID NO: 1152 - DNA, 225 bp, Unknown
  Encodes 16S rRNA from Coprococcus
agagtttgatcctggctcaggatgaacgctggcggcgtgcttaacacatgcaagtcgaacggagtttagcgcttccaaagcttcggcagaggattgttaaacttagtggcggacgggtgagtaacgcgtgggtaacctgccatatacagggggataacacttagaaataggtgctaataccgcataagcgcacggcatcgcatgatgccgtgtgaaaaactccgg

SEQ ID NO: 1153 - DNA, 225 bp, Unknown
  Encodes 16S rRNA from Bradyrhizobium
agagtttgatcatggctcagaacgaacgctggcggcacgcctaacacatgcaagtcggacggtatggatagcttgctattcatatagtggcggactggtgagtaatatgtaggaatctgcccataggttagggatagcaccgggaaactggtggtaatacctgatatcctggagacaggaaaggagcaattcgccgatggaggagcctatatctgattagatagt

SEQ ID NO: 1154 - DNA, 225 bp, Unknown
  Encodes 16S rRNA from Clostridium IV
agagtttgatcctggctcaggacgaacgctggcggcgtgcctaacacatgcaagtcgagcggacttataaatagaaggtgcttgcactggaaatttacaagttagcggcggacgggtgagtaacgcgtgagcaacctgtcctctacagggggataagatttcgaaagggattctaataccgcatgagaccacagcagggcatcctgcgggggtcaaaggaggaat

SEQ ID NO: 1155 - DNA, 225 bp, Unknown
  Encodes 16S rRNA from Sphingobacterium
agagtttgatcatggctcaggatgaacgctagcggcaggcctaatacatgcaagtcggacgggatccattgatagcttgctatccatggtgagagtggcgcacgggtgcgtaacgcgtgagcaacctacctccatcagggggatagcctctcgaaagagagattaacaccgcataacataatgttccggcatcgggatattattaaatatttataggatggagat

SEQ ID NO: 1156 - DNA, 225 bp, Unknown
  Encodes 16S rRNA from Gelidibacter
agagtttgatcatggctcaggataaacgctagcggcaggcctaacacatgcaagtcgagcggcatcgggagtggcaacacttgccggcgagcggcggacgggtgagtaacgcgtatgcaacctgcccaccacacggagatagccgaccgaaaggacgattaaactccgatggcaccttctgggggcatccccgaaaggttaaatattcataggtggtggatgggc

SEQ ID NO: 1157 - DNA, 225 bp, Unknown
  Encodes 16S rRNA from Vasilyevaea
agagtttgatcatggctcagaacgaacgctggcggcaggcttaacacatgcaagtcgaacgccccgcaaggggagtggcagacgggtgagtaacgcgtgggaatctacccagttctacggaacaactgagggaaacttcagctaataccgtatacgccctacgggggaaagatttatcggaattggatgagcccgcgttggattagctagttggtggggtaatgg

SEQ ID NO: 1158 - DNA, 225 bp, Unknown
  Encodes 16S rRNA from Eubacterium
agagtttgatcatggctcaggacgaacgctggcggcgtgcttaacacatgcaagtcgaacgaagcttgattaatgaattcttcggaatgatttatgatatgactgagtggcggacgggtgagtaacgcgtgagtaacctgcctcttggagggggatagtgtttggaaacgaacagtaataccgcataacgtgcattgatggcatcatcgatgtaccaaagattta

SEQ ID NO: 1159 - DNA, 225 bp, Unknown
  Encodes 16S rRNA from Clostridium XlVa
agagtttgatcatggctcaggatgaacgctggcggcgtgcttaatacatgcaagtcgaacgagcagagatattcgtatcaaagcgagtggcggacgggtgagtaacgcgtgggaaacctgccctataccgggggataacagttggaaacgactgctaataccgcataagcgcacgatgtcgcatgacattgtgcgaaaaactccggtggtataggatggtcccgc

SEQ ID NO: 1160 - DNA, 225 bp, Unknown
  Encodes 16S rRNA from Eubacterium
agagtttgatcctggctcaggacgaacgctggcggcgtgcttaacacatgcaagtcgaacgaagcttgaagatagatttcttcggaatgacatctgatatgactgagtggcggacgggtgagtaacgcgtgagcaacctgcccttcggagggggatagcgtttggaaacgaacggtaataccgcataatgttaacggaaggcatcttctgttaaccaaaactccg

SEQ ID NO: 1161 - DNA, 225 bp, Unknown
  Encodes 16S rRNA from Syntrophococcus
agagtttgatcatggctcaggatgaacgctggcggcgtgcctaacacatgcaagtcgaacgggaactccgatctgaaggttcgctggatgattggaaattctagtggcggacgggtgagtaacgcgtgggtaacctgccctttagagggagataacagagagaaatttctgataatatcccatatgcttacagcttcgcatgaagcagtgaggaaagaatttcgc

SEQ ID NO: 1162 - DNA, 225 bp, Unknown
  Encodes 16S rRNA from Prevotella
agagtttgatcatggctcaggatgaacgctagctacaggcttaacacatgcaagtcgaggggcagcatgtaggttgcttgcaacctatgatggcgaccggcgcacgggtgcgtaacgcgtatccaaccttccccgcagtagggtgcagcccgttgaaagacggattaatcccctatgttgtccattgacggcatccgatttggacgaaaggtttcaccgctgcgg

SEQ ID NO: 1163 - DNA, 225 bp, Unknown
  Encodes 16S rRNA from Treponema
agagtttgatcctggctcagaacgaacgctggcggcgcgtcttaagcatgcaagtcggacggcaagattggtgcttgcactgatcctagagtggcggactggtgagtaacgcgtgggtgacgtaccctccggacggggatagctactagaaatagtagataataccggatacggtgcactgtgtcagaggcagtgcaggaaaggttcttttgaaccgccggggga

SEQ ID NO: 1164 - DNA, 225 bp, Unknown
  Encodes 16S rRNA from Anaerovorax
agagtttgatcatggctcaggatgaacgctggcggcgtgcctaacacatgcaagtcgagcgagaagctttccagaagatacttcggttgattcagggaagtggaaagcggcggacgggtgagtaacgcgtaggcaacctgccccttgcagagggatagcctcgggaaaccgggattaaaacctcataatgcggtgagaagacatcttcatatcgccaaagattta

SEQ ID NO: 1165 - DNA, 225 bp, Unknown
  Encodes 16S rRNA from Erysipelotrichaceae incertae sedis
agagtttgatcctggctcaggatgaacgctggcggcatgcctaatacatgcaagtcgaacggagcctttcggggctcagtggcgaacgggtgagtaacacgtaggtaacctgcccatgtgcccgggacaacagctggaaacggctgctaaaaccggataggtatcgaggaggcatctcctggatattaaaggggctttcgggccctgaacatggatggacctgcg

SEQ ID NO: 1166 - DNA, 225 bp, Unknown
  Encodes 16S rRNA from Sulfurovum
agagtttgatcatggctcagagtgaacgctggcggcgtgcttaacacatgcaagtcgaacgagaacggtccttcgggatgtcagctaagtggcggacgggtgagtaatgtatagttaatctgccctttagagggggataacagttggaaacgactgctaataccccatactccttttaccttaatggtaattgggaaacgttttttcgctaaaggatgagactat

SEQ ID NO: 1167 - DNA, 225 bp, Unknown
  Encodes 16S rRNA from Clostridium IV
agagtttgatcatggctcaggagaaacgctggcggcgcacataagacatgcaagtcgaacggaatttagccaaatgtttacatgaggcgaaaatttagtggcggacgggtgagtaacacgtgagcaacctgcctttaagagggggataacattgagaaatcagtgctaataccgcataaagcatatccaccgcatgatggatataagccaaaggagaaatccgct

SEQ ID NO: 1168 - DNA, 225 bp, Unknown
  Encodes 16S rRNA from Papillibacter
agagtttgatcatggctcaggatgaacgctggcggcgtgcataacacattcaagtcgaacgaagcactttggttggagacttcggtcaaagaccgatttgacttagtggcggacgggtgagtaacgcgtgagcaacctgccttgaagagggggataacacagggaaacttgtgctaataccgcataacgtacgtggatcgcatggttcgtgtaccaaagccttta

SEQ ID NO: 1169 - DNA, 225 bp, Unknown
  Encodes 16S rRNA from Paracoccus
agagtttgatcatggctcagaacgaacgctggcggcaggcctaacacatgcaagtcgagcgcaccttcgggtgagcggcggacgggtgagtaacgcgtgggaatatgcccttctctacggaatagtctcgggaaactgggggtaataccgtatacgccctacgggggaaagatttatcggagaaggattagcccgcgttggattaggtagttggtggggtaacgg

SEQ ID NO: 1170 - DNA, 225 bp, Unknown
  Encodes 16S rRNA from Hydrogenoanaerobacterium
agagtttgatcatggctcaggacgaacgctggcggcgcgcctaacacatgcaagtcgaacggaactagtgaccggagggtagaaaacttctatcttgcgatcactagttcagtggcggacgggtgagtaaaacatgagcaacctggctagtagagggggatagcttttggaaacagaagataataccgcatacatcagagatttcgcatgaagtttttggaaaag

SEQ ID NO: 1171 - DNA, 225 bp, Unknown
  Encodes 16S rRNA from Adhaeribacter
agagtttgatcatggctcaggatgaacgctggcggcaggcttaatacatgcaagtcgaacggtaacgaccggtagcaatactggggcgacgagtggcgcacgggtgcgtaacgcgtatgcaacctaccctcaaccggggcataacgccgagaaattggcgctaatatcccatgtgtatatggagtggcatctctccatatataaagatccgttggttaaggatgg

SEQ ID NO: 1172 - DNA, 225 bp, Unknown
  Encodes 16S rRNA from Lachnospiracea incertae sedis
agagtttgatcatggctcaggatgaacgctggcggcgcgcttaacacatgcaagtcgaacgagatgagtgacttcggtcatgagtctagtggcggacgggtgagtaacgcgtggacaacttgccttatagtgggggatagccgaaagaaatttcgattaataccgcataatacaatttgatcgcatgattggattgggaaaggcttcggtcgctaaaagaaaggt

SEQ ID NO: 1173 - DNA, 225 bp, Unknown
  Encodes 16S rRNA from Bacteroides
agagtttgatcatggctcaggatgaacgctagctacaggcttaacacatgcaagtcgaggggcagcatgggggaggtttcggccacccccgatggcgaccggcgaatgggtgagtaacgcgtatccaacctgcccctgtcccggggacagcccttagaaatgaggattaacccccgatggcgcggattagccgcatggcttttccgccaaatgcgaaggacaggg

SEQ ID NO: 1174 - DNA, 225 bp, Unknown
  Encodes 16S rRNA from Hydrogenoanaerobacterium
agagtttgatcatggctcaggagaaacgctggcggcgcacataagacatgcaagtcgaacggaacttaaattgatgtttacattagcttaagtttagtggcggactggtgagtaacacgtgagcaacctgccctttagaggggaataacattgagaaatcagtgctaataccgcataaagcaacattatcgcatgatgaagttgccaaaggagaaatccgctgaa

SEQ ID NO: 1175 - DNA, 225 bp, Unknown
  Encodes 16S rRNA from Telmatospirillum
agagtttgatcatggctcagaacgaacgctggcggcatgcttaacacatgcaagtcgaacggtgttgttcagtacttgtattgagcaacatagtggcaaacgggtgagtaacgcgtgggaacgtacccaacagtattggataacgtttggaaacgaacgctaatacaatatacgcttgagagaggaaagagagatcgctgatggagcggcccgcgttagattagg

SEQ ID NO: 1176 - DNA, 225 bp, Unknown
  Encodes 16S rRNA from Clostridium XlVa
agagtttgatcatggctcaggatgaacgctggcggcgtgcctaacacatgcaagtcgaacgaagcacttctcccgttgaagcctattagcttgctatgaagcggaaacaattgaagtgacttagtggcggacgggtgagtaacgcgtgggtaacctgccctgtacagggggacaacagctagaaatggctgctaataccgcataagcgcacagcatcgcatggtg

SEQ ID NO: 1177 - DNA, 225 bp, Unknown
  Encodes 16S rRNA from Hydrogenoanaerobacterium
agagtttgatcatggctcaggacgaacgctggcggcacgcttaacacatgcaagtcgaacggaacttgggagcttgctttcaagtttagtggcggacgggtgagtaacacgtgagcaacctgcctttcggcggggaataatgattggaaacgatcactaataccccataaaacagagataccgcatggtaattctgtcaaagattcatcaccgaaagatgggctc

SEQ ID NO: 1178 - DNA, 225 bp, Unknown
  Encodes 16S rRNA from Clostridium IV
agagtttgatcatggctcaggatgaacgctggcggcgtgcataacacattcaagtcgaacgaagcactgacgaggaagtcttcggatggaattgtctttgacttagtggcggacgggtgagtaacgcgtgagcaaccttcctggcagtgagggataacacagggaaacttgtgctaataccgcatgacgcactgagatcgcatggttttagtgccaaagattcat

SEQ ID NO: 1179 - DNA, 225 bp, Unknown
  Encodes 16S rRNA from Vasilyevaea
agagtttgatcctggctcagaacgaacgctggcggcaggcttaacacatgcaagtcgaacgccccgcaaggggagtggcagacgggtgagtaacgcgtgggaatctacccagttctacggaataacccagggaaacttggactaataccgtatacgccctacgggggaaagatttatcggaattggatgagcccgcgttggattagctagttggtggggtaatgg

SEQ ID NO: 1180 - DNA, 225 bp, Unknown
  Encodes 16S rRNA from Anaeroplasma
agagtttgatcatggctcaggattaacgctggcggcgtgcctaatacatgcaagtcgaatggtagtagcaatacaaaccatggcgaacgggtgagtaacacgtaggcaacctgactttaagacgaggataaccgttggaaacgacggataatactggataggacatcacaaagggcatccttagatgtttaaaggttatcatgccacttagagaggggcctgcgg

SEQ ID NO: 1181 - DNA, 225 bp, Unknown
  Encodes 16S rRNA from Sporotomaculum
agagtttgatcctggctcaggacgaacgctggcggcgtgcttaacacatgcaagtcgaacgaggaatgccgaaaagcttgctttttgacatttcgagtggcggacgggtgagtaacgcgtgaggaacctgtcttctacagggggataacgtcccgaaagggacgctaataccgcataagaccacggtgccgcatggcacaggggtcaaaggagcaatccggtgga

SEQ ID NO: 1182 - DNA, 225 bp, Unknown
  Encodes 16S rRNA from Clostridium IV
agagtttgatcctggctcaggatgaacgctggcggcgtgcctaacacatgcaagtcgaacggagcttgagggcttgcccttaagcttagtggcggacgggtgagtaacgcgtgagtaacctgcctttgagaggggaataacttcccgaaagggatgctaataccgcataacacataactgtcgcatggcagaaatgtcaaagattatatcgctcaaagatggact

SEQ ID NO: 1183 - DNA, 225 bp, Unknown
  Encodes 16S rRNA from Enterorhabdus
agagtttgatcatggctcaggatgaacgctggcggcgtgcctaacacatgcaagtcgaacggagaaaccgccctcgggcggagatgaagtggcgaacgggtgagtaacacgtgaccaacctgccccgcgctccgggacagcctcgcgaaagcgggattaataccggatgcgccgcgggccccgcatggggcccgcgggaaagcccaggcggcgcgggatggggtc

SEQ ID NO: 1184 - DNA, 225 bp, Unknown
  Encodes 16S rRNA from Bacteroides
agagtttgatcctggctcaggatgaacgctagctacaggcttaacacatgcaagtcgaggggcagcattaagtcagcttgctgatttagatggcgaccggcgcacgggtgagtaacgcgtatccaacctgccccctacccggggatagccttgcgaaagtaagattaatacccggtgctgttgcgatcccgcatggggatgcaacgaaagattcatcggtagggg

SEQ ID NO: 1185 - DNA, 225 bp, Unknown
  Encodes 16S rRNA from Anaerotruncus
agagtttgatcctggctcaggatgaacgctggcggcgtgcctaacacatgcaagtcgaacgaagctccgatacggaatcttcggaggaagtagaggaagacttagtggcggacgggtgagtaacgcgtgagcaacctgcctttcggagggggataacgattggaaacgatcgctaataccgcataacatatacgtatcgcatggtatgtatatcaaagctgaggc

SEQ ID NO: 1186 - DNA, 225 bp, Unknown
  Encodes 16S rRNA from Rhodopirellula
agagtttgatcatggctcagaatgaacgttggcggcgtggattaggcatgcaagtcgaacggtaaggttacttagcttgctttgtaaccctagagtggcgaaagggatagtacaatgtagatcatataccctcaggttggggatagcgtctggaaacgggcggtaatacccgataacatctccggatcaaaggtgagattccgcctgaggattagtttacacact

SEQ ID NO: 1187 - DNA, 225 bp, Unknown
  Encodes 16S rRNA from Clostridium XlVa
agagtttgatcctggctcaggatgaacgctggcggcgtgcttaatacatgcaagtcgaacgaggaattgtgattgaagttttcggatggatttcacttttccgagtggcggacgggtgagtaacgcgtgggtaacctgccttacacagggggacaacagctggaaacggctgctaataccgcataacccgctagagtcgcatgactcagacggaaaagatttatc

SEQ ID NO: 1188 - DNA, 225 bp, Unknown
  Encodes 16S rRNA from Gelidibacter
agagtttgatcatggctcaggataaacgctagcggcaggcctaacacatgcaagtcgagcggcagcgggagtggcaacacttgccggcgagcggcggacgggtgagtaacgcgtatgcaacctgcccaccacacggagatagccgaccgaaaggacgattaaactccgatggcattgggagccggcatcggcatccaattaaatatttataggtggtggatgggc

SEQ ID NO: 1189 - DNA, 225 bp, Unknown
  Encodes 16S rRNA from Anaerofustis
agagtttgatcatggctcaggacgaacgctggcggcgtgcttaacacatgcaagtcgaacgggaagctttggttagttcgctaaacaaagtggacagtggcgaacgggtgagtaacgcgtaggtaaccaacctcatactgggggatagcctttggaaacgaagagtaataccgcataagaccacactgtcgcatggcagaggggtaaaagatttatcggtatgag

SEQ ID NO: 1190 - DNA, 225 bp, Unknown
  Encodes 16S rRNA from Butyricicoccus
agagtttgatcctggctcaggataaacgctggcggcgcacataagacatgcaagtcgaacgggaactttattgaagttatctgatataaagttctagtggcggactggtgagtaatgtataagcaacctgcctgcaagaggggaataacagtgagaaatcattgctaataccgcataagctgtgagtatggcatcatacaaacagaaaaggaagcaattccgctt

SEQ ID NO: 1191 - DNA, 225 bp, Unknown
  Encodes 16S rRNA from Butyricicoccus
agagtttgatcctggctcaggatgaacgctggcggcgtgcataacacattcaagtcgaacggagatattgggatcaatccttcgggaagcgtttcaatattttagtggcggacgggtgagtaacgcgtgagcaacctgccttgaagagggggataacacagggaaacttgtgctaataccgcataacgtacgatggtcgcatggccgacgtaccaaagctccgac

SEQ ID NO: 1192 - DNA, 225 bp, Unknown
  Encodes 16S rRNA from Clostridium XlVa
agagtttgatcctggctcaggatgaacgctggcggcgtgcctaacacatgcaagtcgaacgaagacgcttattcagattctttcgggatgacgaatttgtggactgagtggcggacgggtgagtaacgcgtgggtaacctgccttgtacagggggacaacagttagaaatgactgctaataccgcataagccaacggaatcgcatgattcagttggaaaaactcc

SEQ ID NO: 1193 - DNA, 225 bp, Unknown
  Encodes 16S rRNA from Cryptanaerobacter
agagtttgatcatggctcaggacgaacgctggcggcatgcctaacacatgcaagtcgaacggaacaagactggctgtagcgatactttcggtcttgtttagtggcgaacgggtgagtaacacgtgagcaacctgccttttacacagggataacagccggaaacggctgctaataccggataagaccacaccgaggcatctcggaggggtcaaagcgatttagcgg

SEQ ID NO: 1194 - DNA, 225 bp, Unknown
  Encodes 16S rRNA from Clostridium XlVa
agagtttgatcatggctcaggatgaacgctggcggcgtgcttaatacatgcaagtcgaacgaagctgatgcgacggaacctttcggggggaagatgcattagactgagtggcggacgggtgagtaacgcgtgggtaacctgccttatacagggggataacatttggaaacagatgctaataccgcataagcgcacagaaccgcatggttcagtgtgaaaagctcc

SEQ ID NO: 1195 - DNA, 225 bp, Unknown
  Encodes 16S rRNA from Mogibacterium
agagtttgatcatggctcaggatgaacgctggcggcgtgcctaatacatgcaagtcgagcgagaatctcctttgaagcgttttcggacaattctgtggagaggaaagcggcggacgggtgagtaacgcgtaggcaacctgcccttagcagagggatagccattggaaacgatgattaaaacctcataatgccattcttacacatgttgggatggccaaagattta

SEQ ID NO: 1196 - DNA, 225 bp, Unknown
  Encodes 16S rRNA from Syntrophococcus
agagtttgatcatggctcaggatgaacgctggcggcgtgcttaacacatgcaagtcgaacggagctattttagaaagcggagcttgctctgatggatatgatagcttagtggcggacgggtgagtaacgcgtgggcaacctgccttacacagggggacaacagttggaaacgactgctaataccgcataagccggtaatctcgcatgggatatccggaaaagatt

SEQ ID NO: 1197 - DNA, 225 bp, Unknown
  Encodes 16S rRNA from Bacteroides
agagtttgatcatggctcaggatgaacgctagcggcaggcttaacacatgcaagtcgaggggcagcgtgggggtagcaatactcccgacggcgaccggcgcacgggtgagtaacgcgtatgcaacctttcccagacagggggatagcccagggaaacttggattaataccccgtaggccggatgagggcatcctcgtccggttaaagttccggcggtctggggtg

SEQ ID NO: 1198 - DNA, 225 bp, Unknown
  Encodes 16S rRNA from Treponema
agagtttgatcatggctcagaacgaacgctggcggcgcgtcttaagcatgcaagtcgggcgggattcatgtgcttgcacatgatgagagcggcggactggcgaggagcgcgtgggtgacgcaccccccggacggggacagccggcagaaatgccgggtgataccggatgaggtcccccttgttggaggagggggaggaaaggggcttcggccccgccgggggagc

SEQ ID NO: 1199 - DNA, 225 bp, Unknown
  Encodes 16S rRNA from Coraliomargarita
agagtttgatcatggctcagagtgaacgctggcggcgtggctaagacatgcaagttgagcgagaatataccttcgggtatagggaagcggcaaacgggtgagtaacacgtaagtaacctacccttgagactgggatagctcagcgaaagttgaggtaataccggatgacaaccattaacgcatgttaatggattcaaagggatgagacgatgctcaaggaggggc

SEQ ID NO: 1200 - DNA, 225 bp, Unknown
  Encodes 16S rRNA from Ruminococcus
agagtttgatcctggctcaggacgaacgctggcggcacgcttaacacatgcaagtcgaacgggactaagagagaagcttgcttcacttttagtttagtggcggacgggtgagtaacacgtgagtaacctgcccttatcaggggaatagcctccggaaacggagagtaataccgcataagatgacgatgtggcatcacatagtcataaaagattttatcggataag

SEQ ID NO: 1201 - DNA, 225 bp, Unknown
  Encodes 16S rRNA from Prevotella
agagtttgatcctggctcaggatgaacgctagctacaggcttaacacatgcaagtcgaggggcagcatgtcgtgtgcttgcacacgatgatggcgaccggcgcacgggtgagtaacgcgtatccaacctgcccatgactccgggatagcccgctgaaaagcggattaacaccggatggggtcgaacgaggacatctgatttcgaccaaagctttttgcggtcatg

SEQ ID NO: 1202 - DNA, 225 bp, Unknown
  Encodes 16S rRNA from Pseudaminobacter
agagtttgatcctggctcagaacgaacgctggcggcaggcttaacacatgcaagtcgagcgccccgcaaggggagcggcagacgggtgagtaacgcgtgggaatctacccaactctacggaataacccagggaaacttggactaataccgtatacgtcctccgggagaaagatttatcggagttggatgagcccgcgtcggattagctagttggtgaggtaatgg

SEQ ID NO: 1203 - DNA, 225 bp, Unknown
  Encodes 16S rRNA from Prevotella
agagtttgatcatggctcaggatgaacgctagcggcaggcttaacacatgcaagtcgaggggcagcgcgttgtagcaatacaatggcggcgaccggcgaaagggtgagtaacgcgtgagcgacgtgcccgtcacagggggacaagggctggaaacggcttctgataccccataggaatgtatgcttcatggtgtatgtttgaaagatttatcggtgacggatcgg

SEQ ID NO: 1204 - DNA, 225 bp, Unknown
  Encodes 16S rRNA from Treponema
agagtttgatcctggctcagaacgaacgctggcggcgcgtcttaagcatgcaagtcgagcggcaagatggggttcgccccgtcccagagcggcggactggtgagtaacacgtgggtgacgcaccctcgggatcgggatagcctgcagaaatgcagggtaataccggatgatgtccgtgcagccggaatgcacggaggaaaggggcttcggccccgccggaggaac

SEQ ID NO: 1205 - DNA, 225 bp, Unknown
  Encodes 16S rRNA from Syntrophococcus
agagtttgatcatggctcaggatgaacgctggcggcgtgcttaacacatgcaagtcgaacgggaactctagactgaaggttcgctggaagtttagaaattctagtggcggacgggtgagtaacgcgtgggtaacctgcctataagacgtgaacaacagttagaaatgactgctaatacacgataagcacaccagtatcgcatgatacagtgtgaaaagaatttcg

SEQ ID NO: 1206 - DNA, 225 bp, Unknown
  Encodes 16S rRNA from Clostridium IV
agagtttgatcatggctcaggatgaacgctggcggcgtgcataacacattcaagtcgaacggagatatactgattaatccttcgggaagcgtcggtatattttagtggcggacgggtgagtaacgcgtgagcaacctgccttgaagagggggataacacagggaaacttgtgctaataccgcataacatacaagaatcgcatggttttagtatcaaagctccgac

SEQ ID NO: 1207 - DNA, 225 bp, Unknown
  Encodes 16S rRNA from Tenacibaculum
agagtttgatcctggctcaggatgaacgctagcggcaggcttaacacatgcaagtcgaggggtaacaggcggtagcaatactgtgctgacgaccggcgcacgggtgcgtaacgcgtatgcaacctgcccgcgacagggggataacggagggaaacttccactaatatcccatggtgccgaaggttcgcatgggctttcggctaaaggggcgacccggttgcggat

SEQ ID NO: 1208 - DNA, 205 bp, Unknown
  Encodes 16S rRNA from Parabacteroides
agagtttgatcctggctcaggatgaacgctagcgacaggcttatggtcaatggacgcgagtctgaaccagccaagtcgcgtgcgggacgaaggccctccgggtcgtaaaccgctttagccggggagtaacgtgggggacgtgtccctcagtgagagtacccggagaataagcatcggctaactccgtgccagcagccgcggtaat

SEQ ID NO: 1209 - DNA, 225 bp, Unknown
  Encodes 16S rRNA from Luteimonas
agagtttgatcctggctcagaacgaacgctggcggcaggcctaaaacatgcaagttgaacgggtgtagcaatacatcagtagcggacgggtgaggaacatatgggaacgtgccctttggtgggggataacttctggaaacgggaggtaataccgcataagccatgagtgggaaatatttatagccggaggagcggcccatattggattagctagttggttaggta

SEQ ID NO: 1210 - DNA, 225 bp, Unknown
  Encodes 16S rRNA from Eubacterium
agagtttgatcctggctcaggacgaacgctggcggcgtgcttaacacatgcaagtcgaacgaagcttgaatttagatttcttcggaatgataaatgatatgactgagtggcggacgggtgagtaacgcgtgagcaacctgcccttcggagggggatagcgtttggaaacgaacggtaataccgcataatgttaacggatggcatcgtctgttaaccaaaactccg

SEQ ID NO: 1211 - DNA, 225 bp, Unknown
  Encodes 16S rRNA from Roseburia
agagtttgatcatggctcaggatgaacgctggcggcgtgcctaacacatgcaagtcgaacggacccatgggagtgattagcttgctatgaactcccggaaggttagtggcggacgggtgagtaacgcgtgggtaacctgcctcatacagggggatagcagttggaaacgactggtaataccgcataagcgcacagtaccgcatggtacagtgtgaaaagctccga

SEQ ID NO: 1212 - DNA, 225 bp, Unknown
  Encodes 16S rRNA from Oscillibacter
agagtttgatcatggctcaggacgaacgctggcggcgtgcttaacacatgcaagtcgaacgaagctctcacgcttgagttttcggacaagagggtgagaagacttagtggcggactggtgagtaacgcgtgagcaacctgccctccggtgggggacaacagttggaaacgactgctaataccgcataatgtacaggggccgcatgacccttgtaccaaagcttaa

SEQ ID NO: 1213 - DNA, 225 bp, Unknown
  Encodes 16S rRNA from unknown taxa
agagtttgatcatggctcaggacgaacgctggcggcgtgcttcatacatgcaagtcgaacgagaatcagaagcttgcttctgaggaaagtggcggacgggtgagtaatatgtagagaatctgccctttagatggggacaacagttggaaacgactgctaatacccaatatgcgcgtagttgagatactattcgtgaaaactccggtgctaaaggatgagtctgca

SEQ ID NO: 1214 - DNA, 225 bp, Unknown
  Encodes 16S rRNA from Prevotella
agagtttgatcatggctcaggatgaacgctagctacaggcttaacacatgcaagtcgaggggcagcacggaggtagcttgctacttttggtggcgaccggcgaatgggtgagtaacgcgtatccaacctgccgcgtgcccggggatagcccctggaaacggggattaagacccgatggcgtggtgccgccgcatgacggcgccattaaaccggcacgcgatgggg

SEQ ID NO: 1215 - DNA, 225 bp, Unknown
  Encodes 16S rRNA from Clostridium IV
agagtttgatcatggctcaggacgaacgctggcggcgcgcctaacacatgcaagtcgaacggagagtgcgctttgaatccttcgggacgattagctcatttcttagtggcggacgggtgagtaacacgtgagcaacctgccttgcagagcgggataacgattggaaacgatcgctaataccgcataatatatgattgtcgcatggctttcatatcaaagatttat

SEQ ID NO: 1216 - DNA, 225 bp, Unknown
  Encodes 16S rRNA from Treponema
agagtttgatcatggctcagaacgaacgctggcggcgcgtcttaagcatgcaagtcgagcgggattatccagcttgctggatatgagagcggcggactggtgagtaacacgtaggcaacgtacccttcggacggggatagccggcagaaatgtcgggtaataccggatgtgaacatgagccgtaaaggttcatgtggaaaggagcttcggctccgccggaggagc

SEQ ID NO: 1217 - DNA, 225 bp, Unknown
  Encodes 16S rRNA from Clostridium IV
agagtttgatcatggctcaggatgaacgctggcggcgtgcttaacacattcaagtcgaacggtgaagggggcttcggttcccggatcagtggcggacgggtgagtaacgcgtgaataacctgcctgtgtgtgggggataacagttggaaacggctgctaataccgcataacgtacggacaccgcatgatgaccgtaccaaagatttattgcgcacagatggattc

SEQ ID NO: 1218 - DNA, 225 bp, Unknown
  Encodes 16S rRNA from Victivallis
agagtttgatcctggctcagaacgaacgctggcggcatggattaggcatgcaagtcgaacgggtgcagcaatgcaccagtggcgcaagggtgaggaacacgtgagtaatctaccctcaagattgggatagctcctggaaacgggaattaataccggatgaaacagtttatccgcatggatgaacttttaaagcagcaatgcgcttgaggaggagctcgcgtccca

SEQ ID NO: 1219 - DNA, 225 bp, Unknown
  Encodes 16S rRNA from Clostridium XlVa
agagtttgatcctggctcaggatgaacgctggcggcgtgcctaacacatgcaagtcgaacgaagaccccgaggcagagatttcggtcgaagccaagggaggactgagtggcggacgggtgagtaacgcgtggataacctgccccatacagggggatagcagttggaaacgactgataataccgcataagcgcacgagggggcatcctcaagtgtgaaaaacttta

SEQ ID NO: 1220 - DNA, 225 bp, Unknown
  Encodes 16S rRNA from Oscillibacter
agagtttgatcatggctcaggacaaacgctggcggcgtgcctaacacatgcaagtcgaacggagcttatcaccttcgggaggtaagcttagtggcggactggtgagtaacgcgtgagcaacctgcccttcagtgggggacaacagccggaaacggctgctaataccgcatgagattatgggaaggcatcttcttgtaattaaagatttattgctgaaggatgggc

SEQ ID NO: 1221 - DNA, 225 bp, Unknown
  Encodes 16S rRNA from Papillibacter
agagtttgatcatggctcaggataaacgctggcggcgtgcataacacattcaagtcgaacgaagcacttcggaacgagacttcggtcaagtgaagatttgacttagtggcggacgggtgagtaacgcgtgagcaatctgcctcggggtgcgggataacgtttggaaacgaacgctaataccgcatgacgcatgaggttcacatggaccatatgccaaaggtttac

SEQ ID NO: 1222 - DNA, 225 bp, Unknown
  Encodes 16S rRNA from Cellulosilyticum
agagtttgatcatggctcaggataaacgctggcggcgcacataagacatgcaagtcgaacgagtttaatacctagcttgctaggtaagcgactagtggcggactggtgagtaacacgtaaggaacctgcctattagagaggaatacctttgagaaatcagagctaatacctcatatgccttatttatcgcatgataaaagagggaaaggagcaatccactaatag

SEQ ID NO: 1223 - DNA, 225 bp, Unknown
  Encodes 16S rRNA from Treponema
agagtttgatcctggctcagaacgaacgctggcggcgcgtcttaagcatgcaagtcgggcgggattccccagcttgctggggatgagagcggcggactggtgagtaacgcgtgggcgacgcgccccgtggaccgggatagcctgtggaaacacagggtaataccgggcgagctcccccgcgccggaggcgggggaggaaaggagccgaggctccgccacgggagc

SEQ ID NO: 1224 - DNA, 225 bp, Unknown
  Encodes 16S rRNA from Ruminococcus
agagtttgatcatggctcaggacgaacgctggcggcgtgcctaacacatgcaagtcgaacggagctgaggagcttgcttctcagcttagtggcggacgggtgagtaacgcgtgagtaacctgcctccgagagtggaataacgttttgaaaagaacgctaataccgcataatattatgaagtcgcatggctttataatcaaagagtatatcgctcggagatggact

SEQ ID NO: 1225 - DNA, 225 bp, Unknown
  Encodes 16S rRNA from Coraliomargarita
agagtttgatcctggctcagagtgaacgctggcggcgtggctaagacatgcaagttgagcgagaatatgctttcgggcatagggaagcggcaaacgggtgagtaacacgtaagtaacctgcccttgagactgggatagctcagcgaaagttgaggtaataccggatgacaaccattgatgcatgttaatggattgaaagggatgaaaggatgctcaaggaggggc

SEQ ID NO: 1226 - DNA, 225 bp, Unknown
  Encodes 16S rRNA from Butyricicoccus
agagtttgatcatggctcaggacgaacgctggcggcgtgcctaacacatgcaagtcgaacggagttgaggagcttgctccttaacttagtggcgatcggtagccggactgagaggttgaacggccacattgggactgagacacggcccagactcctacgggaggcagcagtgggggatattgcgcaatgggggcaaccctgacgcagcaacgccgcgtgaaggat

SEQ ID NO: 1227 - DNA, 225 bp, Unknown
  Encodes 16S rRNA from Blautia
agagtttgatcatggctcaggatgaacgctggcggcgtgcctaacacatgcaagtcgaacggagcttatggtgaaagatacttcggtagatggaagcgtaagcttagtggcggacgggtgagtaacgcgtggagaacctgccctgtaccgggggataacagagggaagcttctgctaataccgcataagcgcacggcaccgcatggtgcagtgtgaaaaactccg

SEQ ID NO: 1228 - DNA, 225 bp, Unknown
  Encodes 16S rRNA from Lachnospiracea incertae sedis
agagtttgatcatggctcaggatgaacgctggcggcacgcttaacacatgcaagtcgagcggagaattgacttcggttgattcttagcggcggacgggtgaggaacgcgtgggtaatctgccctatacaggggaataacacagagaaatttgtgataaaaccgcataagcccacgggatcgcatggtcctgtgagaaaaactccggtggtataggatgagcccgc

SEQ ID NO: 1229 - DNA, 225 bp, Unknown
  Encodes 16S rRNA from Prevotella
agagtttgatcatggctcaggatgaacgctagcggcaggcttaacacatgcaagtcgaggggcagcgcggggtagcaatactctggcggcgaccggcagacgggtgcgtaacgcgtatgcaacctacccaccacaggggtatagcccggcgaaagccggaataatcccccatggttccaacccaccgcatgatgagttggataaacccgcgagggggtgatggat

SEQ ID NO: 1230 - DNA, 225 bp, Unknown
  Encodes 16S rRNA from Clostridium IV
agagtttgatcatggctcaggacgaacgctggcggcatgcctaacacatgcaagtcgaacggagttatttggattcgtctggataacttagtggcggacgggtgagtaacacgtgagcaacctgcccttcagagggggacaacagctggaaacggctgctaataccgcataacatatacgaaaggcatcttttgtatatcaaagatttatcgctgagggatgggc

SEQ ID NO: 1231 - DNA, 225 bp, Unknown
  Encodes 16S rRNA from Clostridium IV
agagtttgatcatggctcaggatgaacgctggcggcgtgcataacacattcaagtcgaacgagcgagtgcccttcgggacacgagctagtggcggacgggtgagtaacgcgtgagcaacctgcccctgtgtgcgggataacgtcgggaaactgacgctaataccgcataacacatgagtcccgcatggggcatatgtcaaagatttattgcacagggatgggctc

SEQ ID NO: 1232 - DNA, 225 bp, Unknown
  Encodes 16S rRNA from Clostridium III
agagtttgatcatggctcaggacgaacgctggcggcgtgcctaacacatgcaagtcgaacgagaaatatggaaaggatcccttcggggagaatagaaatatggacagtggcggacgggcgagtaacgcgtgagtaacctgcccataagcgggggatagccgatggaaacgtcgagtaataccccatgatgtatatatatcgcatggtatatatattaaagattta

SEQ ID NO: 1233 - DNA, 225 bp, Unknown
  Encodes 16S rRNA from Neptunomonas
agagtttgatcctggctcaggatgaacgctagctacaggcttaacacatgcaagtcgaggggaatattgcacaatgggggaaaccctgatgcagccatgccgcgtgtgtgaagaaggccttcgggttgtaaagcacttttgcattcgaggaagacagcgtataaataaatgcgctatttgacgttagagtgtgaataagcaccggcaaactccgtgccagcagcc

SEQ ID NO: 1234 - DNA, 225 bp, Unknown
  Encodes 16S rRNA from Clostridium IV
agagtttgatcctggctcaggatgaacgctggcggcgtgcataacacattcaagtcgaacggacaccttcgggtgtcagtggcggacgggtgagtaacgcgtgagtaacctgccgcggattggggaataacgaccggaaacagtcgctaataccgcataacgcacgatgaccgcatggtcgacgtgccaaagatttatcgatccgcgatggactcgcgtccaatt

SEQ ID NO: 1235 - DNA, 225 bp, Unknown
  Encodes 16S rRNA from Howardella
agagtttgatcctggctcaggacgaacgctggcggcatgcttaacacatgcaagtcgaacggactgattccttcgggatgaaagttagtggcgaacgggtgagtaatgtatgagcaacctgcctctgtcaacgggataacagttggaaacgactgctaatacggtataagaccacggcaccgcatggtgctgcggtaaaagatttttcggacagagatgggctca

SEQ ID NO: 1236 - DNA, 225 bp, Unknown
  Encodes 16S rRNA from Clostridium IV
agagtttgatcatggctcaggatgaacgctggcggcgtgcataacacattcaagtcgaacggagatagaagcttcggtttttatcttagtggcggacgggtgagtaacgcgtgagcaacctgcccctgtgtgcgggataacgtttggaaacggacgctaataccgcatgacccaacgggaccgcatgatcttgttggcaaagattcattgcacagggatgggctc

SEQ ID NO: 1237 - DNA, 220 bp, Unknown
  Encodes 16S rRNA from Roseburia
agagtttgatcatggctcaggatgaacgctagctacaggcttaacacatgcaagtcgagaggcagcagtggggaatattgcacaatgggggaaaccctgatgcagcgacgccgcgtgagcgaagaagtatttcggtatgtaaagctctatcagcagggaagataatgacggtacctgactaagaagcaccggctaaatacgtgccagcagccgcggtaat

SEQ ID NO: 1238 - DNA, 225 bp, Unknown
  Encodes 16S rRNA from Oscillibacter
agagtttgatcctggctcaggacgaacgctggcggcgtgcttaacacatgcaagtcgaacgaagctctcacgcttgagttttcggacaagagggtgagatgacttagtggcggactggtgagtaacgcgtgagcaacctgccctccggtgggggacaacagttggaaacgactgctaataccgcataatgtacagagaccgcatgatctttgtaccaaagcttta

SEQ ID NO: 1239 - DNA, 225 bp, Unknown
  Encodes 16S rRNA from Clostridium XlVa
agagtttgatcatggctcaggatgaacgctggcggcgtgcttaacacatgcaagtcgaacgaggaattaccgatgaagttttcggatggatttggtttttccgagtggcggacgggtgagtaacgcgtgggtaacctgccttacactgggggacaacagagagaaatttctgctaataccgcataacccgctaggggcgcatgccccggacggaaaagatttatc

SEQ ID NO: 1240 - DNA, 225 bp, Unknown
  Encodes 16S rRNA from Clostridium IV
agagtttgatcatggcttaggatgaacgctggcggcgtgcataacacattcaagtcgaacggagagtgagcttcggctcacaatcagtggcggacgggtgagtaacgcgtgagcaacctgcccggaagcgtgggataacagagggaaacttctgctaataccgtatatcgtattcggatcgcatgttctgaatacaaaagggtttccgcttccggatgggctcgc

SEQ ID NO: 1241 - DNA, 225 bp, Unknown
  Encodes 16S rRNA from Sporobacter
agagtttgatcatggctcaggatgaacgctggcggcgtgcctaacacattcaagtcgaacggtgaagggacttcggtcccggatcagtggcggacgggtgagtaacgcgtgagcaacctgcctctgactgggggataacagccggaaacggctgctaataccgcataacgtgcgaccttcgcatgaaggacgcaccaaagatttatcggtcagagatgggctcgc

SEQ ID NO: 1242 - DNA, 225 bp, Unknown
  Encodes 16S rRNA from Clostridium XlVa
agagtttgatcctggctcaggatgaacgctggcggcgtgcctaacacatgcaagtcgaacgaagcatattggaaagagcccttcgggacgatggaagatatgacttagtggcggacgggtgagtaacgcgtgggcaacctgccgtacacagggggacaacagctggaaacggctgctaataccgcataagcgcacagcttcgcatggagtagtgtgaaaagcatt

SEQ ID NO: 1243 - DNA, 225 bp, Unknown
  Encodes 16S rRNA from Butyricicoccus
agagtttgatcctggctcaggatgaacgctggcggcgtgcataacacattcaagtcgaacgaagcacttcggacagatcccttcggggtgaagactgatttgacttagtggcggacgggtgagtaacgcgtgagcaacctgccttgaagagggggataacacagggaaacttgtgctaataccgcataacgtaccgacatcgcatggtgatggtaccaaagcctt

SEQ ID NO: 1244 - DNA, 225 bp, Unknown
  Encodes 16S rRNA from Clostridium XlVa
agagtttgatcatggctcagattgaacgctggcggcgtgcctaacacatgcaagtcgaacgagcgaggtatgaaacctagtgaataccgagcgagtggcggacgggtgagtaacgcgtgggtaacctgccttacagagggggataacagtctgaaaagactgctaataccgcataagcacacagtaccgcatggtacagggtgaaaagaattatcactgtaagat

SEQ ID NO: 1245 - DNA, 225 bp, Unknown
  Encodes 16S rRNA from Filomicrobium
agagtttgatcatggctcagaacgaacgctggcggcaggcctaacacatgcaagtcgaacgccctagcaatagggagtggcagacgggtgagtaacgcgtgggaaccttcccagtggtacggaatagcccagggaaacttggagtaataccgtataatacccgaaaggggaaagatttatcgccattggatgggcccgcgttggattagctagttggtgaggtaa

SEQ ID NO: 1246 - DNA, 225 bp, Unknown
  Encodes 16S rRNA from Bacteroides
agagtttgatcctggctcaggatgaacgctagctacaggcctaacacatgcaagtcgcggggcagcatgggcgtagcaatacgcctgatggcgaccggcgcacgggtgcgtaacgcgtatccaacctggcccttactcgggtatagccctgcgaaagtaggattaatccccgatgttgtcaagcgatagccttttcacttgaccaaagagttattcggtaaggga

SEQ ID NO: 1247 - DNA, 225 bp, Unknown
  Encodes 16S rRNA from Clostridium XlVa
agagtttgatcatggctcaggatgaacgctggcggcgtgcctaacacatgcaagtcgaacgggactttatggaatgcgattcgtcaaatgaaataaagtttagtggcggacgggtgagtaacgcgtgggtaacctgccttacagagggggataacggttggaaacgactgctaataccgcataagcccacagtaccgcatggtacagggggaaaagatttatcgc

SEQ ID NO: 1248 - DNA, 225 bp, Unknown
  Encodes 16S rRNA from Brevundimonas
agagtttgatcatggctcaggacgaacgctggcggtgtgcctcatacatgcaagtcgaacgataaggttccttcgggaatacataagtggcggacgggtgagtacaacataggaaatctgccccaaagcgggggacaacagagggaaacttctgctaataccccatacgagcttagttgaaatactaatcttgaaagatttatcactttgggatgagcctgtgcc

SEQ ID NO: 1249 - DNA, 225 bp, Unknown
  Encodes 16S rRNA from Clostridium IV
agagtttgatcatggctcaggacgaacgctggcggcgtgcctaacacatgcaagtcgagcggagacataagaggaagcggaagttttcggatggaagcggacatttatgttttagcggcggacgggtgagtaacgcgtgagcaacctgtccctcacagggggataacacaccgaaaggtgtactaataccgcatgacactgctgaaggacatcctatagcagtca

SEQ ID NO: 1250 - DNA, 225 bp, Unknown
  Encodes 16S rRNA from Paracoccus
agagtttgatcatggctcagaacgaacgctggcggcaggcctaacacatgcaagtcgagcgagaccttcgggtctagcggcggacgggtgagtaacgcgtgggaatatgcccttctctacggaatagtcctgggaaactgggggtaataccgtatacgccctttgggggaaagatttatcggagaaggattagcccgcgttggattaggtagttggtggggtaat

SEQ ID NO: 1251 - DNA, 225 bp, Unknown
  Encodes 16S rRNA from Schlegelella
agagtttgatcctggctcagattgaacgctggcggcatgccttacacatgcaagtcgaacggcagcgggggagcttgctcctgccggcgagtggcgaacgggtgagtaatgcatcggaacgtgtcctgttgtgggggataactgatcgaaagatcagctaataccgcatgagacctgagggtgaaagcgggggatcgaaagacctcgcgcgacaggagcggccga

SEQ ID NO: 1252 - DNA, 225 bp, Unknown
  Encodes 16S rRNA from Clostridium XI
agagtttgatcctggctcaggatgaacgctggcggcgtgcctaacacatgcaagtcgagcgaacccttcggggtgagcggcggacgggtgagtaacgcgtgggtaacctgccctgtacacacggataacataccgaaaggtatgctaatacgagataatatattttaatcgcatggttaagatatcaaagctccggcggtacaggatggacccgcgtctgattag

SEQ ID NO: 1253 - DNA, 225 bp, Unknown
  Encodes 16S rRNA from Diaphorobacter
agagtttgatcctggctcagattgaacgctggcggcatgccttacacatgcaagtcgaacggtaacggaccttcgggtgccgacgagtggcgaacgggtgagtaatacatcggaacgtgcccgatcgtgggggataacgaggcgaaagctttgctaataccgcatacgatctacggatgaaagcaggggaccgcaaggccttgcgcggacggagcggccgatggc

SEQ ID NO: 1254 - DNA, 225 bp, Unknown
  Encodes 16S rRNA from Clostridium sensu stricto
agagtttgatcatggctcaggacgaacgctggcggcgcgcctaacacatgcaagtcgaacgggactagtgaccggagcttagaagtcttctaggttgcgttcactagttcagtggcggacgggtgagtaaagcatgagtaactttcccattagtggggaatagcttttggaaacagaagataataccgcatacatcgttgaggactcatgttctcttcggaaaag

SEQ ID NO: 1255 - DNA, 225 bp, Unknown
  Encodes 16S rRNA from Saccharopolyspora
agagtttgatcctggctcaggacgaacgctggcggcgtgcttaacacatgcaagtcgaacgctgaagctctgcccttgtggtggggtggatgagtggcgaacgggtgagtaacacgtgggtaatctgccccatactctgggataacccctggaaacgggggctaataccggataggacattctgccgcatggtggggtgtggaaagttccggcggtatgggatgg

SEQ ID NO: 1256 - DNA, 225 bp, Unknown
  Encodes 16S rRNA from Prevotella
agagtttgatcctggctcaggatgaacgctagctacaggcttaacacatgcaagtcgaggggcatcaggtatcaagcttgcttgatatgctggcgaccggcgcacgggtgcgtaacacgtatcgaaccttcccgcctctccgggacagccctctgaaaggaggattaataccggatggcttcaccttgccgcatggcatggtgaataaagattcatcggagacgg

SEQ ID NO: 1257 - DNA, 225 bp, Unknown
  Encodes 16S rRNA from Eggerthella
agagtttgatcctggctcaggatgaacgctggcggcgtgcctaacacatgcaagtcgaacgatgaaaccgcctccgggcggacatgaagtggcgaacgggtgagtaacacgtgaccaacctgccccgcgcaccgggacagccccccgaaagggggattaataccggatactccggccgggccgcatggcccggccgggaaagctccggcggcgcgggatggggtc

SEQ ID NO: 1258 - DNA, 225 bp, Unknown
  Encodes 16S rRNA from Gelidibacter
agagtttgatcctggctcaggataaacgctagcggcaggcctaacacatgcaagtcgagcggcagcgggagtagcaatacttgccggcgagcggcggacgggtgagtaacgcgtatgcaacctgcccaccacacggagatagccgaccgaaaggacgattaaactccgatggcattgggacccggcatcgggatccaattaaatatttataggtggtggatgggc

SEQ ID NO: 1259 - DNA, 225 bp, Unknown
  Encodes 16S rRNA from Prevotella
agagtttgatcctggctcaggatgaacgctagctacaggcttaacacatgcaagtcgaggggcagcatggcggtggcttgccaccgccgatggcgaccggcgcacgggtgagtaacgcgtatccaacctgcccacaacctccgaatagcccgccgaaaggcggattaatgcgggatgtggtctgaagaagacatctgaactagaccaaaggttttttccggttgt

SEQ ID NO: 1260 - DNA, 225 bp, Unknown
  Encodes 16S rRNA from Pseudomonas
agagtttgatcatggctcagattgaacgctggcggcaggcctaacacatgcaagtcgagcggatgaagggagcttgctcccggattcagcggcggacgggtgagtaatgcctaggaatctgcctggtagtgggggacaacgttccgaaaggagcgctaataccgcatacgtcctacgggagaaagtgggggatcttcggacctcacgctatcagatgagcctagg

SEQ ID NO: 1261 - DNA, 225 bp, Unknown
  Encodes 16S rRNA from Prevotella
agagtttgatcatggctcaggatgaacgctagctacaggcttaacacatgcaagtcggggggcagcacggggtgcagcaatgcacttgggtggcgaccggcgaatgggtgagtaacgagtatccaacctgccccgcgctccgggacagccccgcgaaagcgggattaataccggatgcggcatggttcccgcatgggctccatgtcaaagattcatcggcgcggg

SEQ ID NO: 1262 - DNA, 225 bp, Unknown
  Encodes 16S rRNA from Prevotella
agagtttgatcatggctcaggatgaacgctagctacaggcttaacacatgcaagtcgaggggcatcggggaggtagcttgctatctctgccggcgaccggcgcacgggtgagtaacgcgtatccaacctgccgcatagtcgggcacagccctctgaaaggaggattaatgccggatgtggtcttagtgagacatctcatatagactgaagatttattgctatgcg

SEQ ID NO: 1263 - DNA, 225 bp, Unknown
  Encodes 16S rRNA from Prevotella
agagtttgatcatggctcaggatgaacgctagctacaggcttaacacatgcaagtcgaggggcagcatggcggtggcttgccactgccgatggcgaccggcgcacgggtgagtaacgcgtatccaacctgcccgcaaccgcggaatagcccgccgaaaggcggattaatgccgcatgagctcgcgtgggggcatctgcccgcgagcaaaggttcactccggttgc

SEQ ID NO: 1264 - DNA, 225 bp, Unknown
  Encodes 16S rRNA from Brevundimonas
agagtttgatcatggctcaggacgaacgctggcggtgtgcctcatacatgcaagtcgaacgagaagctttcttcggaaagtggaaagtggcggacgggtgagtacaacataggaaatctgccctaaagtgggggacaacagagggaaactcctgctaataccccatacgagcttagttgaaatactaatcttgaaagatttatcgctttaggatgagcctgtgcc

SEQ ID NO: 1265 - DNA, 225 bp, Unknown
  Encodes 16S rRNA from Bacteroides
agagtttgatcctggctcaggatgaacgctggcggcgtgcctaacacatgcaagtcgaggggcagcatggtcttagcttgctaaggccgatggcgaccggcgcacgggtgagtaacgcgtatccaacctgccgtccagtaggggacagcccgtagaaatgcggattaataccctatgttctccgaggatgacatcagattcggagtaaagattcatcgctggacg

SEQ ID NO: 1266 - DNA, 225 bp, Unknown
  Encodes 16S rRNA from Clostridium XlVa
agagtttgatcctggctcaggataaacgctggcggcgtgcttaacacatgcaggtcgaacgaggtatcgaagattaatcttcggaagcgtttttgataccgagtggcggacgggtgagtaacgcgtgggtaacctgcccggaagagggggacaacagttggaaacgactgctaataccgcataagccgacggagccgcatggctctgccggaaaaggagtgatcc

SEQ ID NO: 1267 - DNA, 209 bp, Unknown
  Encodes 16S rRNA from Photobacterium
agagtttgatcctggctcagattgaacgctggcgggggaatattgcacaatgggggaaaccctgatgcagccatgccgcgtgtgtgaagaaggccttcgggttgtaaagcacttttgcattcgaggaagacagcgtataaataaatgcgctatttgacgttagagtgtgaataagcaccggcaaactccgtgccagcagccgcggtaat

SEQ ID NO: 1268 - DNA, 225 bp, Unknown
  Encodes 16S rRNA from Clostridium XlVa
agagtttgatcatggctcaggatgaacgctggcggcgtgcttaatacatgcaagtcgaacgggataaattggaagcttgcttttgatttatctagtggcggacgggtgagtaacgcgtgggtaacctgcctcatacagggggataacagttagaaatgactgctaaaaccgcataacattgtggtaccgcatgatatcacgatcaaatatttataggtatgagat

SEQ ID NO: 1269 - DNA, 225 bp, Unknown
  Encodes 16S rRNA from Clostridium XlVb
agagtttgatcatggctcaggatgaacgctggcggcgtgcctaacacatgcaagtcgagcgaagggttgagagcttgctcttaactacttagcggcggacgggtgagtaacgcgtgggtaacctgccctgtacagaggaataacagttagaaatgactgctaatgcctcataagccgacgaaatggcatcattatgtcggaaaagatttatcggtacaggaggga

SEQ ID NO: 1270 - DNA, 225 bp, Unknown
  Encodes 16S rRNA from Prevotella
agagtttgatcatggctcaggatgaacgctagctacaggcttaacacatgcaagtcgaggggcagcagggcaatagcttgctattgctgctggcgaccggcgcacgggtgagtaacgcgtatccaacctaccccgcggtcagggacagcccggcgaaagtcggattaatacctgatgcagtcagaagagggcatctgattttgacgaaagattttatcgcctcgg

SEQ ID NO: 1271 - DNA, 225 bp, Unknown
  Encodes 16S rRNA from Clostridium IV
agagtttgatcatggctcaggacgaacgctggcggcgtgcttaacacatgcaagtcgaacgaagcttgatttatgatttcttcggaatgaataatgatatgacttagtggcggacgggtgagtaacgcgtgaggaacctgcctttcagagggggacaacatttggaaacgaatgctaataccgcataacgcattttaaggacatccttttaatgccaaagattta

SEQ ID NO: 1272 - DNA, 225 bp, Unknown
  Encodes 16S rRNA from Anaeroplasma
agagtttgatcatggctcaggattaacgctggcggcgtgcctaatacatgcaagtcggatggttagcttgctaaccatggcgaacgggtgagtaacacgtaggtaacctgtctaagacacgaggataaccattggaaacgatggataatactggataggacatttgaaggcatctttggatgtttaaagatttatcggtaatagaggggcctgcggcgcattagc

SEQ ID NO: 1273 - DNA, 225 bp, Unknown
  Encodes 16S rRNA from Caldilinea
agagtttgatcctggctcaggatgaacgctggcggcgtgcttaacacatgcaagtcgaacgtgagggtgcagcaatgtacctgaaagtggcaaacgggtgagtaacacgtagatgacctgcctcgtagtgggggataaccacgggaaactgtggctaataccgcatggtcttgttagtatgggaatactttcaagtaaagctttatgtgctatgagaggggtctg

SEQ ID NO: 1274 - DNA, 225 bp, Unknown
  Encodes 16S rRNA from Clostridium XlVa
agagtttgatcatggctcaggatgaacgctggcggcgtgcctaacacatgcaagtcgaacggagacttggcgctgacgagtgaaatagcttgctatggaacaaatcttgccaagacttagtggcggacgggtgagtaacgcgtggacaacctggcccatacagggggacagcagctggaaacggctgataataccgcataagcgcacagtatcacatggtacagt

SEQ ID NO: 1275 - DNA, 225 bp, Unknown
  Encodes 16S rRNA from Victivallis
agagtttgatcatggctcagaatgaacgctggcggcatggattaggcatgcaagtcgaacggggcgcagcgatgcgcccagtggcgaaagggtgagtagcacgtgaagaacctgcccccggatccggaacaagcgctggaaacggcgtctgatacgggatgtggacgtcccccgcatggggggcgctctaaagattcatcgtccggggagggcttcgcgtcccat

SEQ ID NO: 1276 - DNA, 225 bp, Unknown
  Encodes 16S rRNA from Brevundimonas
agagtttgatcatggctcaggacgaacgctggcggcgtgcttcatacatgcaagtcgaacgagaatctctagcttgctagagaggaaagtggcggacgggtgagtaatatgtagagaatctgccctagagagtgggacaacagagggaaacttctgctaataccgcatatgcgcgtagctgagatgctattcgtgaaaactctggtgctctgggatgagtctgca

SEQ ID NO: 1277 - DNA, 225 bp, Unknown
  Encodes 16S rRNA from unknown taxa
agagtttgatcatggctcaggatgaacgctggcggcgtgcttcatacatgcaagtcgaacgagaaatgatagcttgctatcatggaaagtggcggacgggtgagtaatacatagggaatctgcccttagccgggggacaacagttggaaacgactgctaataccgcatatgagtatagttttatacttgaaaactccggtggctaaggatgagcctgtgcctgat

SEQ ID NO: 1278 - DNA, 225 bp, Unknown
  Encodes 16S rRNA from Prevotella
agagtttgatcatggctcaggatgaacgctagctacaggcttaacacatgcaagtcgaggggcagcatgtcagtggcttgccactgatgatggcgaccggcgcacgggtgagtaacgcgtatccaaccttcccccaagtagggaatagcccggcgaaagtcggattaatgccctatgttttccttatgtgagcattctgtgaggaacaaagattgatcgcttggg

SEQ ID NO: 1279 - DNA, 225 bp, Unknown
  Encodes 16S rRNA from Slackia
agagtttgatcctggctcaggatgaacgctggcggcgtgcctaacacatgcaagtcgaacggagaagccgccctcgggcgggtatgaagtggcgaacgggtgagtaacacgtgaccaacctgccccgcgcaccgggacaaccccccgaaaggggggctgataccggatacgcccccggcgccgcatggcggcggggggaaagcccagacggcgcgggatggggtc

SEQ ID NO: 1280 - DNA, 225 bp, Unknown
  Encodes 16S rRNA from Pedobacter
agagtttgatcatggctcaggatgaacgctagcggcaggcttaacacatgcaagtcgaggggcatcgcgggagtagcaatacacctggcggcgaccggcggaagggtgcgtaacgcgtgagcaacatgcccgtcacagggggataacagatggaaacgtctcctaataccccgtaacatcatctgcggcatcgcaggtggttgaaagtttcggcggtgacggatt

SEQ ID NO: 1281 - DNA, 225 bp, Unknown
  Encodes 16S rRNA from Prevotella
agagtttgatcctggctcaggatgaacgctagctacaggcttaacacatgcaagtcgaggggcagcacggttgttgcttgcaacaactggtggcgaccggcgcacgggtgagtaacgcgtatccaacctgcccgcaaccgcggaatagcccgccgaaaggcggattaatgccgcatgagctcgcgcgagggcatcatttcgcgagcaaaggttcactccggttgc

SEQ ID NO: 1282 - DNA, 225 bp, Unknown
  Encodes 16S rRNA from Trueperella
agagtttgatcatggctcaggacgaacgctggcggcgtgcttaacacatgcaagtcgaacgatgaagctggtgcttgcactggtggattagtggcgaacgggtgagtaatacgtgagtaacctgcccttgtctttgggataagcctgggaaactgggtctaatactggatattctgcgctggccgcatggttggtgttggaaagggttatggactggatggggat

SEQ ID NO: 1283 - DNA, 225 bp, Unknown
  Encodes 16S rRNA from Oscillibacter
agagtttgatcatggctcaggataaacgctggcggcgcacataagacatgcaagtcgaacggaagtcgtaattaaaaaggaacaaagatttatcggagtgagattttaactacaatggctttagtggcggactggtgagtaatgtataagtaacctgcctattagaggggaacaacagttggaaacagctgctaataccgcatatgccataagaaccgcatggtt

SEQ ID NO: 1284 - DNA, 225 bp, Unknown
  Encodes 16S rRNA from unknown taxa
agagtttgatcatggctcaggatgaacgctggcggcgtgcttcatacatgcaagtcgaacgagaattggtagcttgctaccaaggaaagtggcggacgggtgagtaatacatagggaatctgcccttagctgggggacaacagttggaaacgactgctaataccgcatatgagtatagttgagatattatacttgaaaactccggtggctagggatgagcctgtg

SEQ ID NO: 1285 - DNA, 225 bp, Unknown
  Encodes 16S rRNA from Victivallis
agagtttgatcatggctcagaatgaacgctggcggcatggattaggcatgcaagtcgaacggggtccttcgggacctagtggcgaaagggtgagtaacacgtgagcaatctgcccccaaggccggaataagcactggaaacggtgtctaaaaccggatgaggcctggagtcgcatgactcctcagccaaatattcataccctggggatgagctcgcggcccatta

SEQ ID NO: 1286 - DNA, 225 bp, Unknown
  Encodes 16S rRNA from Bacteroides
agagtttgatcatggctcaggatgaacgctagcggcaggcttaacacatgcaagtcgaggggcagcggagaagtagcaatacttctgccggcgaccggcgcacgggtgagtaacgcgtatgcaacctttcccagacagggggatagcccagggaaacttggattaataccccgtaggccgtggggcggcatcgccctatggttaaagttccggcggtctggggtg

SEQ ID NO: 1287 - DNA, 225 bp, Unknown
  Encodes 16S rRNA from Micrococcus
agagtttgatcatggctcaggatgaacgctggcggcgtgcttaacacatgcaagtcgaacgatgaagcccagcttgctgggtggattagtggcgaacgggtgagtaacacgtgagtaacctgcccttaactctgggataagcctgggaaactgggtctaataccggataggagcgcctaccgcatggtgggtgttggaaagatttatcggttttggatggactcg

SEQ ID NO: 1288 - DNA, 225 bp, Unknown
  Encodes 16S rRNA from Olivibacter
agagtttgatcatggctcaggatgaacgctagcggcaggcctaatacatgcaagtcgtacggtaagcggtccttcgggaccgtgagagtggcggacgggtgcgtaacgcgtatgcaaccaacccccctcgccgggatagccggtggaaacgccggataataccggatgcgccgcgggggaggcatcttcccggcggcaaggcggagacgcggagggggacgggca

SEQ ID NO: 1289 - DNA, 225 bp, Unknown
  Encodes 16S rRNA from Anaerophaga
agagtttgatcatggctcaggatgaacgctagcgacaggcctaacacatgcaagtcgaggggtaacagggagcttgctccgctgacgaccggcgcacgggtgagtaacgcgtatgcaacctgcccgcgggatcgggatagccccccgaaagggggattaacaccggatgaggctgcgagggggcatccccatgtagccaaatgcgaagctcgcggatgggcatgc

SEQ ID NO: 1290 - DNA, 225 bp, Unknown
  Encodes 16S rRNA from Selenomonas
agagtttgatcatggctcaggacgaacgctggcggcgtgcttaacacatgcaagtcgaacggggcgattgaaagcttgcttttatgagcctagtggcaaacgggtgagtaacgcgtgggcaacctgccggaaagatggggacaacatcccgaaaggggtgctaataccgaatgttgtatacggggcgcatgccttgtatattaaaggattttatccgctttccga

SEQ ID NO: 1291 - DNA, 151 bp, Unknown
  Encodes 16S rRNA from Megasphaera
agagtttgatcctggctcagattgaacgctggcggcaggcttaacacatgcaagtcgtacggtaacagagggaagcttgcttctctgctgacgagtgacggtaccgaacatagaaagccacggctaactacgtgccagcagccgcggtaat

SEQ ID NO: 1292 - DNA, 225 bp, Unknown
  Encodes 16S rRNA from Clostridium XlVa
agagtttgatcctggctcaggatgaacgctggcggcgtgcctaacacatgcaagtcgaacgaagcacacggattgatcccttcggggtgattgaagtatgactgagtggcggacgggtgagtaacgcgtgggtaacctgcctcatacagggggataacagttagaaatgactgctaataccgcataagcgcacagcatcgcatggtgcagtgtgaaaaactccgg

SEQ ID NO: 1293 - DNA, 225 bp, Unknown
  Encodes 16S rRNA from Clostridium XlVa
agagtttgatcatggctcaggatgaacgctggcggcgtgcctaacacatgcaagtcgaacggggtacagacgctgtgagaagaagtgcttgcacggaatcaaacttgtttgtacttagtggcggacgggtgagtaacgcgtggaaaacctgcctcatacagggggataacaggaagaaattcctgctaataccgcataagcgcacaggaaggcatctttcagtgt

SEQ ID NO: 1294 - DNA, 225 bp, Unknown
  Encodes 16S rRNA from Eubacterium
agagtttgatcatggctcaggatgaacgctggcggcgtgcttaacacatgcaagtcgagcgagaaatcgctcagttgatacttcggttgaaaacagagcgacggaaagcggcggacgggtgagtaacgcgtgggaaacctgccctttacagggggacagccgagggaaacttcgattaataccccataatgccatagtatcgcatggtaccatggccaaagattt

SEQ ID NO: 1295 - DNA, 225 bp, Unknown
  Encodes 16S rRNA from unknown taxa
agagtttgatcatggctcaggatgaacgctggcggcgtgcttcatacatgcaagtcgaacgagaattgatagcttgctatcaaggaaagtggcggacgggtgagtaatacatagggaatctgcccttagctgggggacaacagttggaaacgactgctaataccgcatatgagtatgattgagatattatacttgaaaactccggtggctaaggatgagcctgtg

SEQ ID NO: 1296 - DNA, 225 bp, Unknown
  Encodes 16S rRNA from Clostridium XlVa
agagtttgatcatggctcaggatgaacgctggcggcgtgcctaacacatgcaagtcgaacggaaatgttttgatgaagatttcggttggattcaatacattttagtggcggacgggtgagtaacacgtgggtaacctgccctgtaccgggggataacacttagaaataggtgataataccgcataagcgcacactgaggcatctcagagtgtgaaaaactccggt

SEQ ID NO: 1297 - DNA, 225 bp, Unknown
  Encodes 16S rRNA from Treponema
agagtttgatcctggctcagaacgaacgctggcggcgcgtcttaagcatgcaagtcgagcgggattacctagcttgctaggtatgagagcggcggactggtgagtaacgcgtgggtgacgtacccttctgacggggatagccggtagaaataccgggtaataccggatgcgttctcctgtcttggaagcaggagaagaaaggagctacggctccgcaggaggaac

SEQ ID NO: 1298 - DNA, 225 bp, Unknown
  Encodes 16S rRNA from Cryptanaerobacter
agagtttgatcatggctcaggacgaacgctggcggcatgcctaacacatgcaagtcgaacggaataagaatggctgtagcgatactttcgttcttatttagtggcgaacgggtgagtaacacgtgagcaacctgccttctacacagggataacagccggaaacggctgctaataccggataagaccacactgaggcatctcagaggggtcaaagcgatttagcgg

SEQ ID NO: 1299 - DNA, 225 bp, Unknown
  Encodes 16S rRNA from Xanthomonas
agagtttgatcctggctcagagtgaacgctggcggcaggcctaacacatgcaagtcgaacggcagcacaggagagcttgctctctgggtggcgagtggcggacgggtgaggaatacatcggaatctaccttgtcgtgggggataacgtagggaaacttacgctaataccgcatacgacctacgggtgaaagcaggggaccttcgggccttgcgcgattggatgag

SEQ ID NO: 1300 - DNA, 225 bp, Unknown
  Encodes 16S rRNA from Asteroleplasma
agagtttgatcatggctcaggataaacgccggcggcgtgcctaatacatgcaagtcgaacgggagtagcaatactctagtggcgtacgggtgagtaacacgttggtaacctaccccaaggaccggaataccaaggagaaatctttgctaatgccggatgaaaccatagaagcgcaagcttcattgatcaaaggcggcaattgccgcgccatgggatggacctgcg

SEQ ID NO: 1301 - DNA, 225 bp, Unknown
  Encodes 16S rRNA from unknown taxa
agagtttgatcatggctcaggatgaacgctggcggcgtgcttcatacatgcaagtcgaacgagaattggtagcttgctaccaaggaaagtggcggacgggtgagtaatacatagggaatctgcccttagccgggggacaacagttggaaacgactgctaataccgcatatgaggtaagttgagatacttatcttgaaaactccggtggctaaggatgagcctgtg

SEQ ID NO: 1302 - DNA, 225 bp, Unknown
  Encodes 16S rRNA from Sporotomaculum
agagtttgatcctggctcaggacgaacgctggcggcgtgcttaacacatgcaagtcgaacgaggaatgttgaaaagcttgctttttgacatttcgagtggcggacgggtgagtaacgcgtgaggaacctgtcttctacagggggataacgtcccgaaagggacgctaataccgcataagaccacagtatcgcatgatacaggggtcaaaggagcaatccggtaga

SEQ ID NO: 1303 - DNA, 225 bp, Unknown
  Encodes 16S rRNA from Bacteroides
agagtttgatcatggctcaggatgaacgctagcgacaggcctaacacatgcaagtcgaggggcagcatggttggtagcaataccgactgatggcgaccggcgcacgggtgcgtaacaggtgtgcaatctgtcctataccaagggatagcccgctgaaaggcggattaaaactttatgtgtcatatggaggcatctctgtgtgatgaaacgcgagggtataggatg

SEQ ID NO: 1304 - DNA, 225 bp, Unknown
  Encodes 16S rRNA from Asaccharobacter
agagtttgatcatggctcaggatgaacgctggcggcgtgcttaacacatgcaagtcgaacgattaacccgccttcgggcggtcatagagtggcgaacgggtgagtaacacgtgaccaacctgccccgcgcaccgggacagcctcgcgaaagcgggattaataccggatactccgggggcgccgcatggcgcccccgggaaagctccggcggcgcgggatggggtc

SEQ ID NO: 1305 - DNA, 225 bp, Unknown
  Encodes 16S rRNA from Clostridium IV
agagtttgatcatggctcaggacgaacgctggcggtatgcctaacacatgcaagtcgaacgagtgtcgaagagcttgctcttcttctactagtggcggacgggtgagtaacgcgtgagtaatctgcctcaaagtgggggataacacttagaaatgagtgctaataccgcgtaatgtgctagcttcgcatgaagtctgcaccatagtttttcgctttgagatgagc

SEQ ID NO: 1306 - DNA, 225 bp, Unknown
  Encodes 16S rRNA from unknown taxa
agagtttgatcatggctcaggacgaacgctggcggcgtgcttcatacatgcaagtcgaacgagaaactgacttcggttagtggaaagtggcggacgggtgagtaatgtgtagagaatctgccctggagagtgggacaacagttggaaacgactgctaataccgcatatgagcgtacctgcaatggtattcttgaaatgaattatcgctccgggatgagtctgcat

SEQ ID NO: 1307 - DNA, 225 bp, Unknown
  Encodes 16S rRNA from Clostridium XlVa
agagtttgatcctggctcaggatgaacgctggcggcgtgcttaatacatgcaagtcgaacgagcagagatattcgtatcgaagcgagtggcggacgggtgagtaacgcgtgggaaacctgccctataccgggggataacagttggaaacgactgctaataccgcataagcgcacggagttgcatgactctgtgtgaaaaactccggtggtataggatggtcccgc

SEQ ID NO: 1308 - DNA, 225 bp, Unknown
  Encodes 16S rRNA from Treponema
agagtttgatcatggctcagaacgaacgctggcggcgcgtcttaagcatgcaagtcgaacggcaagctagacttcggtttagcctagagtggcggactggtgagtaacgcgtagatgacgtaccttaaggatggggatagccgatagaaatatcgggtaataccgaatacggtcactgctgttagagggcagtgaggaaagcagctatggctgcgccttaagaac

SEQ ID NO: 1309 - DNA, 225 bp, Unknown
  Encodes 16S rRNA from Prevotella
agagtttgatcctggctcaggatgaacgctagctacaggcttaacacatgcaagtcgaggggcagcgggggcgtagcaatacgcctgccggcgaccggcgcacgggtgagtaacgcgtatccaacctcccccccagtaggggatagcccggcgaaagtcggattaataccctatgtcgtccaggacgggcatcttttccggacgaaagattgatcgctgggggat

SEQ ID NO: 1310 - DNA, 225 bp, Unknown
  Encodes 16S rRNA from Turicibacter
agagtttgatcatggctcaggatgaacgctggcggtatgcttaatacatgcaagtcgagcgagatcttcggatcgagcggcgaacgggtgagtaacacgtaggtaatctgccctttagactgggataccctgaggaaacttaggctaataccggatatgaacttcgaaggcatctttgaagtttgaaagttccgtttggaacactttgggatgaacctgcggcgc

SEQ ID NO: 1311 - DNA, 225 bp, Unknown
  Encodes 16S rRNA from Clostridium IV
agagtttgatcatggctcaggacgaacgctggcggcgtgcctaacacatgcaagtcgaacggagttattagagtgaagttttcggatggagcgaagataacttagtggcggacgggtgagtaacgcgtgagtaacctgcccattagagggggataacgttctgaaaagaacgctaataccgcataacatattcggttcgcatgaactgaatatcaaaggagtaat

SEQ ID NO: 1312 - DNA, 225 bp, Unknown
  Encodes 16S rRNA from Clostridium IV
agagtttgatcatggctcaggatgaacgctggcggcgtgcataacacattcaagtcgaacggactgattttgtagcttgctacgaatgaaagttagtggcggacgggtgagtaacgcgtgagcaacctgcctctgtgtgtgggataccgtctggaaacggacgttaataccgcatgatccatagagatcgcatgatatttatggcaaagatttattgcacagaga

SEQ ID NO: 1313 - DNA, 225 bp, Unknown
  Encodes 16S rRNA from Clostridium IV
agagtttgatcatggctcaggacaaacgctggcggcgtgcttaacacatgcaagtcgaacggagtacccgagaaagaagcttcggcagattgatcggaatacttagtggcggacgggtgagtaacacgtgagtaacctgcccttgagtgggggataacactccgaaaggagtgctaataccgcataacatggatatgttgcatggcaaatccatcaaagatttat

SEQ ID NO: 1314 - DNA, 225 bp, Unknown
  Encodes 16S rRNA from Oscillibacter
agagtttgatcctggctcaggacgaacgctggcggcgtgcttaacacatgcaagtcgaacgaagctctcacactcgagttttcggacaagagagtgagatgacttagtggcggactggtgagtaacgcgtgagcaacctgccctccggtgggggacaacagctggaaacggctgctaataccgcataatgtgtacggaccgcatgatctgtacaccaaagcttta

SEQ ID NO: 1315 - DNA, 225 bp, Unknown
  Encodes 16S rRNA from Deinococcus
agagtttgatcatggctcagggtgaacgctggcggcgtgcttaagacatgcaagtagaacggtcttttcggagacagtggcgcacgggtgagtaacacgtaactgacctgccccaaagtcgcggataactgggtgaaagtccagctaatacgtgatgtgctgtcagattttgttctgccagtaaaggtttactgctttgggatggggttgcgttccatcagctag

SEQ ID NO: 1316 - DNA, 225 bp, Unknown
  Encodes 16S rRNA from Pedobacter
agagtttgatcatggctcaggatgaacgctagcggcaggcctaatacatgcaagtcgaacggtaaatgtcccttcggggacatgagagtggcggacgggtgcgtaacgcgtatgcaaccaacccccctcaccgggatagccggtggaaacgccggataacaccggatgcgcccatggggaggcatctccctgcgggcaaggcggcgacgcggagggggacgggca

SEQ ID NO: 1317 - DNA, 225 bp, Unknown
  Encodes 16S rRNA from Anaerovorax
agagtttgatcctggctcaggatgaacgctggcggcgtgcctaacacatgcaagtcgagcgggaatgtccggaatgaaacttcggtcgaatgaagggcaggacagcggcggacgggtgagtaacgcgtaggtaagctgccccttgcacagggatagcctcgggaaactgggattaatacctgataaagcgcagacagcacatgctgactgcgccaaagatttatc

SEQ ID NO: 1318 - DNA, 225 bp, Unknown
  Encodes 16S rRNA from Clostridium IV
agagtttgatcatggctcaggacgaacgctggcggcgtgcctaacacatgcaagtcgaacggacttagctgagtgcttgcactcggcgacagttagtggcggacgggtgagtaacgcgtgaataacctgcccaacagagggggataacgtttggaaacgaacgctaataccgcataacattggagcatcgcatggtgttctaatcaaaggagcaatccgctgatg

SEQ ID NO: 1319 - DNA, 225 bp, Unknown
  Encodes 16S rRNA from Bacteroides
agagtttgatcctggctcaggatgaacgctagctacaggcctaacacatgcaagtcgaggggcagcgcgggtagcaatacctggcggcgaccggcgcacgggtgcgtaacaggtgtgcaatctgtcctataccgggggatagcccggcgaaagccgaattaaaactccatgtgtcacgaagccgcatgactttgtgatgaaacgttatagggtatagggtgagca

SEQ ID NO: 1320 - DNA, 225 bp, Unknown
  Encodes 16S rRNA from Clostridium IV
agagtttgatcatggctcaggatgaacgctggcggcgtgcataacacattcaagtcgaacgaagcactgtcgaggaagtcttcggatggaattgactttgacttagtggcggacgggtgagtaacgcgtgagcaaccttcctgtttgtgagggataacacagggaaacttgtgctaataccgcatgatgcatgggaatcgcatggtttcgatgccaaagatttat

SEQ ID NO: 1321 - DNA, 225 bp, Unknown
  Encodes 16S rRNA from Rhodococcus
agagtttgatcatggctcaggacgaacgctggcggcgtgcttaacacatgcaagtcgaacggtaaggccccttcgggggtacacgagtggcgaacgggtgagtaacacgtgggtgatctgccctgcactctgggataagcctgggaaactgggtctaataccggatatgagctcctgtcgcatggcgggggttggaaaggtttactggtgcaggatgggcccgcg

SEQ ID NO: 1322 - DNA, 225 bp, Unknown
  Encodes 16S rRNA from Treponema
agagtttgatcatggctcagaacgaacgctggcggcgcgtcttaagcatgcaagtcggacggcaagatcggtgcttgcactgatcctagagtggcggactggtgagtaacgcgtgggtgacgtaccctccggacggggatagctactagaaatagtagataataccggatacggtgcactgtgtcagaggcagtgcaggaaaggttcttttgaaccgccggagga

SEQ ID NO: 1323 - DNA, 225 bp, Unknown
  Encodes 16S rRNA from Mucilaginibacter
agagtttgatcatggctcaggatgaacgctagcggcaggcctaatacatgcaagtcggacgggatctccccttcgggggagtgagagtggcgcacgggtgcgtaacgcgtatgcaaccaaccctcatccgggggacagccggtggaaacgccgggtaataccccataccgattcctgtgggcatccacggggattgaaagacttaggtcggaggaggacgggcat

SEQ ID NO: 1324 - DNA, 225 bp, Unknown
  Encodes 16S rRNA from Clostridium XlVa
agagtttgatcatggctcaggatgaacgctggcggcgtgcctaacacatgcaagtcgaacggtgatgagcagaaattttcggatggaagcttatcatagtggcggacgggtgagtaacgcgtggataacctgcctcttgctgggggatagcagccggaaacggctggtaataccgcatacgttcatttccccgcatggggaggtgaggaaagatttatcggcgag

SEQ ID NO: 1325 - DNA, 225 bp, Unknown
  Encodes 16S rRNA from Olivibacter
agagtttgatcctggctcaggatgaacgctagcggcaggcctaatacatgcaagtcggacgggatctccccttcgggggagtgagagtggcgcacgggtgcgtaacgcgtatgcaaccaaccctcatccgggggacagccggtggaaacgccgggtaataccccatatccactttgggaggcatcttctgaggtggaaagacttaggtcggaggaggacgggcat

SEQ ID NO: 1326 - DNA, 225 bp, Unknown
  Encodes 16S rRNA from Clostridium XlVa
agagtttgatcatggctcaggatgaacgctggcggcacgcttaacacatgcaagtcgaacgaggttatgaacttcggttaataacctagtggcggacgggtgcgtaacgcgtgggtaatctgcccttgacagggggataacgtatagaaatgtacgctaataccgcataagcccacggagaggcatctctctgagggaaaagggatactggtcaaggatgagccc

SEQ ID NO: 1327 - DNA, 225 bp, Unknown
  Encodes 16S rRNA from Barnesiella
agagtttgatcatggctcaggatgaacgctagcgacaggcctaacacatgcaagtcgaggggcagcatggagtagcaatactctgatggcgaccggcgcacgggtgcgtaacaggtgtgcaatctgtcctataccgggggatagcccggcgaaagccgaattaaaactccatgtgagcgattggcgcatgccagtctcttgaaacgtttagggtatagggtgagc

SEQ ID NO: 1328 - DNA, 225 bp, Unknown
  Encodes 16S rRNA from Clostridium XlVb
agagtttgatcatggctcaggatgaacgctggcggcgtgcctaacacatgcaagtcgagcgaagaattgagagcttgctcttaattacttagcggcggacgggtgagtaacgcgtgggtaacctgccctgtacaggggaataacagttagaaatgactgctaatgccccataagccgacgaaatggcatctttatgtcggaaaagatttatcggtacaggaggga

SEQ ID NO: 1329 - DNA, 225 bp, Unknown
  Encodes 16S rRNA from Gelidibacter
agagtttgatcctggctcaggataaacgctagcggcaggcctaacacatgcaagtcgagcggcagcgggagtggcaacacttgccggcgagcggcggacgggtgagtaacgcgtatgcaacctgcccatcacacggagatagccgaccgaaaggacgattaaactccgatggcatcaagagggggcatccccatttgattaaatattcataggtgatggatgggc

SEQ ID NO: 1330 - DNA, 225 bp, Unknown
  Encodes 16S rRNA from Methanobrevibacter
agagtttgatcatggctcaggacgaacgctggcggcgtgcctaacacatgcaagtcgaacgaatttagattcgtggcgtacggctcagtaacacgtggataacctacccttaggactgggataactctgggaaactggggctaataccggatagatgatttttcttggaatgggattttgtttaaatgttttttcgcctaaggatgggtctgcggcagattaggt

SEQ ID NO: 1331 - DNA, 225 bp, Unknown
  Encodes 16S rRNA from Anaerotruncus
agagtttgatcatggctcaggacgaacgctggcggcgtgcctaacacatgcaagtcgaacggagtttactttttagatttcttcggaatgacgagttgtaaacttagtggcggacgggtgagtaacgcgtgagcaacctgcctttcagagggggacaacagttggaaacgactgctaataccgcataatattaggtttagacatctttacctaatcaaaggagca

SEQ ID NO: 1332 - DNA, 225 bp, Unknown
  Encodes 16S rRNA from Lachnospiracea incertae sedis
agagtttgatcatggctcaggatgaacgctagctacaggcttaacacatgcaagtcgaacgaggcgaggagtgcttgcacaccgaacctagtggcggacgggtgcgtaacgcgtgggtaacctgccctaaacagggggataacgtatagaaatgtacgctaataccgcataagctcacggaaccgcatggttttgagggaaaaggatttccggtttaggatgggc

SEQ ID NO: 1333 - DNA, 225 bp, Unknown
  Encodes 16S rRNA from Erysipelotrichaceae incertae sedis
agagtttgatcatggctcaggatgaacgctggcggcatgcctaagacatgcaagtcgtacgaggtggcccattgaaatggagtgcttgcacaaagtggatttggattcccacctagtggcggaagggtgagtaacacgtaggtaatctaccttagagactgggataacaattagaaatgattgctaataccggatgataattatgaggtaaacttgtaatttaaa

SEQ ID NO: 1334 - DNA, 225 bp, Unknown
  Encodes 16S rRNA from Mesorhizobium
agagtttgatcatggctcagaacgaacgctggcggcaggcttaacacatgcaagtcgaacgccccgcaaggggagtggcagacgggtgagtaacgcgtgggaatctacccatcactacggaacaactccgggaaactggagctaataccgtatacgtccttcgggagaaagatttatcggtgatggatgagcccgcgttggattagctagttggtggggtaatgg

SEQ ID NO: 1335 - DNA, 225 bp, Unknown
  Encodes 16S rRNA from Clostridium XI
agagtttgatcatggctcaggacgaacgctggcggcgtgcctaacacatgcaagtcgagcggggatttagtggaaggaagcttcggcggacggaaggtaaatcttagcggcggacgggtgagtaacgcgtgaacaatctgtcccggacagggggataacacatggaaacaggtgctaataccgcataagaccacagcgtcgcatggcggtggggtaaaaggagga

SEQ ID NO: 1336 - DNA, 225 bp, Unknown
  Encodes 16S rRNA from Planctomyces
agagtttgatcatggctcagaatgaacgttggtagcgtggattaggcatgcaagtcgagcgacaaggtttcttcggaaactggaggagcggcaaacggggtaggataacatcggaacgtaccctcttgtccgggatacccgcgggaaactgcggttaataccggataatcccgaaagggcaaaggtccgccgcgggaggagcggccgatgtgatatcagctagtt

SEQ ID NO: 1337 - DNA, 225 bp, Unknown
  Encodes 16S rRNA from Aerococcus
agagtttgatcctggctcaggacgaacgctggcggcatgcctaatacatgcaagtcgagcgaacagatgaagtgcttgcacttctgacgttagcggcgaacgggtgagtaacacgtaaggaatctacctataagcgggggataacattcggaaacgggtgctaataccgcataatatcttcttccgcatggaagaagattgaaagacggctctgctgtcacttat

SEQ ID NO: 1338 - DNA, 225 bp, Unknown
  Encodes 16S rRNA from Victivallis
agagtttgatcatggctcagaacgaacgctggcggcatggattaggcatgcaagtcgaacggtgcagcaatgcatagtggcgcaagggtgaggaacgcgtgagtaatctgccctcaagttgggaacagcttctggaaacggaaattaataccgaatgtgaccattggaaggcatctttcagtggttaaaggccgcaaggtcgcttgaggaggggctcgcgtccca

SEQ ID NO: 1339 - DNA, 225 bp, Unknown
  Encodes 16S rRNA from unknown taxa
agagtttgatcctggctcaggacgaacgctggcggcgtgcttcatacatgcaagtcgaacgagaatcaggagcttgcttctgaggaaagtggcggacgggtgagtaatatgtagagaatctgcccttaagcgggggacaacagttggaaacgactgctaataccccatatgcgcgtagttgcgatactattcgtgaaaactccggtgcttaaggatgagtctgca

SEQ ID NO: 1340 - DNA, 225 bp, Unknown
  Encodes 16S rRNA from Bacteroides
agagtttgatcctggctcaggatgaacgctagctacaggcttaacacatgcaagtcgcggggtatcgcggtgagtagcaatactttctggcggcgaccggcggatgggtgagtaacgcgtatccaacctggccctatctcggggacagcccctcgaaagagggattaatacccgatgttccctggtttccgcatgtttaccagggcaaaggcttttgtcggatag

SEQ ID NO: 1341 - DNA, 225 bp, Unknown
  Encodes 16S rRNA from Clostridium XI
agagtttgatcatggctcaggatgaacgctggcggcgtgcctaacacatgcaagtcgagcgagaagttgctgacggagatttcggtcaacagaagcgatggatagcggcggacgggtgagtaacgcgtaggtaagctgccccgcacacaggaatagcctagggaaacctggattaatgcctgatgacgcggcggagtcacatggctctgtcgccaaagatttatc

SEQ ID NO: 1342 - DNA, 225 bp, Unknown
  Encodes 16S rRNA from Clostridium XlVa
agagtttgatcctggctcaggatgaacgctggcggcgtgcctaacacatgcaagtcgaacgaagaccccgaagcggagatttcggttgaagcagagggaggactgagtggcggacgggtgagtaacgcgtggataacctgccccatacagggggatagcagttggaaacgactgataataccgcatgagcgcacgtggagacatctccatgtgtgaaaagattta

SEQ ID NO: 1343 - DNA, 200 bp, Unknown
  Encodes 16S rRNA from Ruminococcus
agagtttgatcatggctcagattgaacgctggcggcaggcttaacacatgcaagtcgtacggtaacggagggaactctgatgcagcgatgccgcgtggaggaagaaggttttcggattgtaaactcctgtttcgagggacgataatgacggtacctcgggaggaagctccggctaactacgtgccagcagccgcggtaat

SEQ ID NO: 1344 - DNA, 225 bp, Unknown
  Encodes 16S rRNA from Saccharofermentans
agagtttgatcatggctcaggatgaacgctggcggcgtgcctaacacattcaagtcgaacggagaagaaggcttcggccttcggatcagtggcggacgggtgagtaacgcgtgagtaatctgcctttgattggggaataacacagggaaacctgtgctaataccgcataacacagcgacaccgcatgatgatgctgtcaaagaattatcgatcaaagatgagctc

SEQ ID NO: 1345 - DNA, 225 bp, Unknown
  Encodes 16S rRNA from Oscillibacter
agagtttgatcctggctcaggacgaacgctggcggcgtgcctaacacatgcaagtcgaacgaagctcttttcaatgcgattcgtcaagttgaaaggatgacttagtggcgaacgggtgagtaacgcgtgagcaacctgccccggagtgggggacaacagttggaaacgactgctaataccgcatgatatatactaacggcatcgttggtatatcaaagatttatt

SEQ ID NO: 1346 - DNA, 225 bp, Unknown
  Encodes 16S rRNA from Lachnospiracea incertae sedis
agagtttgatcatggctcaggatgaacgctggcggcgtgcttaacacatgcaagtcgaacgaagcaccctcacctcgatactgaatgcgagcttgctcaaatgacgtatcacccgagggtgactgagtggcggacgggtgagtaacgcgtgggtaacctgccttagacagggggataacaacaagaaattgttgctaataccgcataagcacacagcatcgcatg

SEQ ID NO: 1347 - DNA, 207 bp, Unknown
  Encodes 16S rRNA from Fibrobacter
agagtttgatcctggctcaggatgaacgctagctacaggcttaacacatgcaaatgggggaaaccctgatgcagcaacgccacgtgtgggaagaagcatttcggtgtgtaaaccactgtcgtgagggaataatacgcgtcttcgggcgcgggagaatgtacctcgaaaggaagcaccggcaaacttcgtgccagcagccgcggtaat

SEQ ID NO: 1348 - DNA, 225 bp, Unknown
  Encodes 16S rRNA from Kiloniella
agagtttgatcctggctcagaacgaacgctggcggcaggcttaacacatgcaagtcaagggggtgtagcaatacacaaccggcgcacgggtgagtaacgcgtgggaatatgtccatttgtggggaatagcttctggaaacggaaggtaataccgcatacgcccttcgggggaaagatttatcgcagatggagtggcccgcgttagattagctagttggtgaggta

SEQ ID NO: 1349 - DNA, 225 bp, Unknown
  Encodes 16S rRNA from Olivibacter
agagtttgatcatggctcaggatgaacgctagcggcaggcttaacacatgcaagtcgaggggcagcgcgttgtagcaatacaatggcggcgaccggcggaagggtgcgtaacgcgtgagcaacctgcccctgtcagggggatagtcgatggaaacgtcgcgtaataccccgtacgatgcggagtcgcatgattctgcattaaaagatttatcggacagggatggg

SEQ ID NO: 1350 - DNA, 225 bp, Unknown
  Encodes 16S rRNA from Clostridium IV
agagtttgatcatggctcaggatgaacgctggcggcgtgcataacacattcaagtcgaacgaagcaccggcgaggaagtcttcggatggaattgcccttgacttagtggcggacgggtgagtaacgcgtgagcaaccttcctgcttgtgagggataacacagggaaacttgtgctaataccgcatgacgcacgattgtcgcatggcagatgtgccaaagatttat

SEQ ID NO: 1351 - DNA, 225 bp, Unknown
  Encodes 16S rRNA from Spirochaeta
agagtttgatcctggctcagaacgaacgctggcggcgcgttttaagcatgcaagtcgagcggtaagccggagcaatccggcctagagcggcggacgggtgagtaacacgtggataatctggcctacagtttgggatagcctggtgaaagtcaggataataccggatacgacggtttggtcacaagagcgaatcgggaaaggggctaaggcctcgctgaaggatga

SEQ ID NO: 1352 - DNA, 225 bp, Unknown
  Encodes 16S rRNA from Prevotella
agagtttgatcatggctcaggatgaacgctagctacaggcttaacacatgcaagtcgaggggcagcatgtcgtgtgcttgcacgcgatgatggcgaccggcgcacgggtgagtaacgcgtatccaacctgcccatgaccccgggatagcccgctgaaaagcggattaacaccggatgcggtcgaaagaggacatctgatttcgaccaaagcttcggcggtcatgg

SEQ ID NO: 1353 - DNA, 225 bp, Unknown
  Encodes 16S rRNA from Olivibacter
agagtttgatcctggctcaggatgaacgctagcggcaggcctaatacatgcaagtcgaacggtaaacgccccttcgggggtgtgagagtggcgcacgggtgcgtaacgcgtatgcaacccacccgctgccgggggatagcccggagaaatccgaattaataccccatgaggagtaaccaaggcatcttggttatttcaaaacttcggtggcggcggacgggcatg

SEQ ID NO: 1354 - DNA, 225 bp, Unknown
  Encodes 16S rRNA from Prevotella
agagtttgatcatggctcaggatgaacgctagctacaggcttaacacatgcaagtcgaggggcatcaggtatcaagcttgcttgatatgctggcgaccggcgcacgggtgcgtaacacgtatcgaaccttcccgcctctccgggacagccctctgaaaggaggattaataccggatggcttcgcggagccgcatggctctgcgaataaagatttatcggagacgg

SEQ ID NO: 1355 - DNA, 225 bp, Unknown
  Encodes 16S rRNA from Parabacteroides
agagtttgatcatggctcaggatgaacgctagcgacaggcttaacacatgcaagtcgaggggcagcgggggcgatggcaacattgcccgccggcgaccggcgcactggtgagtaacacgtatgcaacctgccccgcacagggggataacccagagaaatttggcctaataccccgtaacaccgttgggggcatccccggtggttgaaagaggcgactcggtgcgg

SEQ ID NO: 1356 - DNA, 225 bp, Unknown
  Encodes 16S rRNA from Prevotella
agagtttgatcctggctcaggatgaacgctagctacaggcttaacacatgcaagtcgcggggcagcatggaggttgcttgcaacctctgatggcgaccggcgcacgggtgagtaacgcgtatccaacctgccctgcggtagggaacagcccggcgaaagtcggattaatgccctatgtgctcatttgaaggcatctgattttgagcaaaggattcgttcgccgca

SEQ ID NO: 1357 - DNA, 225 bp, Unknown
  Encodes 16S rRNA from Leifsonia
agagtttgatcctggctcaggacgaacgctggcggcgtgcttaacacatgcaagtcgaacggtgaacgagggagcttgcttcctccggatcagtggcgaacgggtgagtaacacgtgagcaatctgccccgaactctgggataagcgttggaaacgacgtctaataccggatacgacgcgggagggcatcctctccgcgtggaaagaatttcggttcgggatgag

SEQ ID NO: 1358 - DNA, 225 bp, Unknown
  Encodes 16S rRNA from Clostridium IV
agagtttgatcctggctcaggacgaacgctggcggcgtgcttaacacatgcaagtcgaacgagaatccggggaaggagttttcggacaacggaaccggaggaaagtggcggacgggtgagtaacgcgtgaggaacctgccttggagagggggacaacagctggaaacggctgctaataccgcatgatacgtgatggggacatccctgacacgtcaaagatttatc

SEQ ID NO: 1359 - DNA, 225 bp, Unknown
  Encodes 16S rRNA from Victivallis
agagtttgatcctggctcagaacgaacgctggcggcatggattaggcatgcaagtcgaacggtgtagcaatgcacagtggcgcaagggtgaggaacgcgtgagtaatctaccctcaagttgggaacagcttctggaaacggaaattaataccgaatgtgaccgttggaaggcatcttctgatggttaaaggccgcaaggtcgcttgaggaggggctcgcgtccca

SEQ ID NO: 1360 - DNA, 225 bp, Unknown
  Encodes 16S rRNA from Treponema
agagtttgatcatggctcagaacgaacgctggcggcgcgtcttaagcatgcaagtcgaacggcaagttaccttcgggtaacctagagtggcggactggtgagtaacacgtaggtgacgtaccccccggacggggatagctcctagaaataggagataataccggataaggttgcacgggctggaaccgtgtaaggaaaggtgcttcggcaccgccgggggagcgg

SEQ ID NO: 1361 - DNA, 225 bp, Unknown
  Encodes 16S rRNA from unknown taxa
agagtttgatcatggctcaggacgaacgctggcggcgtgcttcatacatgcaagtcgaacgagaagttaccttcgggtaatggatagtggcggacgggtgagtaatgtgtagagaatctgccttcaagagggggatagcagttggaaacgactattaataccccatatgcgcgtagttggaatactattcgtgaaagattaatcgcttgaagatgagtctgcatc

SEQ ID NO: 1362 - DNA, 225 bp, Unknown
  Encodes 16S rRNA from Sporotomaculum
agagtttgatcctggctcaggacgaacgctggcggcgtgcttaacacatgcaagtcgaacgaggaatgccaaaaagcttgctttttaacatttcgagtggcggacgggtgagtaacgcgtgaggaacctgtcttctacagggggataacgtcccgaaagggacgctaataccgcataagaccacggtatcgcatgatacaggggtcaaaggagcaatccggtaga

SEQ ID NO: 1363 - DNA, 225 bp, Unknown
  Encodes 16S rRNA from Spirochaeta
agagtttgatcctggctcagaacgaacgctggcggcgcgttttaagcatgcaagttgagcggtaacttggatttattcaagctagagcggcggacgggtgagtaacacgtggataatctggcctacagttgggaatagcctgatgaaagtcaggataatgccgaatgagcagttgacggcacaagctgttgattggaaaggggctaaggcctcgctgaaggatga

SEQ ID NO: 1364 - DNA, 225 bp, Unknown
  Encodes 16S rRNA from Clostridium III
agagtttgatcctggctcaggacgaacgctggcggcgcgcctaacacatgcaagtcgaacgggactagtgaccggagagtagatgaggatctattttgcgatcactagttcagtggcggacgggtgagtaaagcatgagcaacctggctactagagggggatagcttttggaaacagaagataataccgcatacatcaaagatttcgcatgagatttttggaaaa

SEQ ID NO: 1365 - DNA, 225 bp, Unknown
  Encodes 16S rRNA from Clostridium XlVa
agagtttgatcatggctcaggatgaacgctggcggcgtgcctaacacatgcaagtcgaacgaggctctgcgaaatgaagattcgtctgattttcaaagatgtccgagtggcggatgggtgagtaacgcgtggagaacctgccctatgctgggggataacaactggaaacggttgacaataccgcataagcttccatggtcgcatgaccttggaaggaaagattta

SEQ ID NO: 1366 - DNA, 225 bp, Unknown
  Encodes 16S rRNA from Anaerovorax
agagtttgatcatggctcaggatgaacgctggcggcgtgcctaacacatgcaagtcgagcgagaattccctgaatgaaacttcggtcgaatgacgggaaggaaagcggcggacgggtgagtaacgcgtaggcaacctgccctttgcagagggatagccactggaaacggtgattaaaacctcataacacgggactgagacatctcagacccgccaaagatttatc

SEQ ID NO: 1367 - DNA, 225 bp, Unknown
  Encodes 16S rRNA from Oscillibacter
agagtttgatcatggctcaggacgaacgctggcggcgtgcttaacacatgcaagtcgaacgagtgagcgttattgcactaagttaactaatgaagttaatttagtgcaatagtgcaagctagtggcggactggtgagtaacgcgtgagcaacctacctttaacagggggataacacttagaaataggtgctaataccgcataacattaagttgtggcatcacaat

SEQ ID NO: 1368 - DNA, 225 bp, Unknown
  Encodes 16S rRNA from Victivallis
agagtttgatcatggctcagaacgaacgctggcggcatggattaggcatgcaagtcgaacgaagcagcaatgcttagtggcgaaagggtgaggaacgcgtgagtaatctgcccccaagttgggaataacagctggaaacggctgctaataccgaatgtggctgattgaccgcatggttgattggctaaagatttatcgcttggggatgagctcgcgtcccattag

SEQ ID NO: 1369 - DNA, 225 bp, Unknown
  Encodes 16S rRNA from Lachnospiracea incertae sedis
agagtttgatcctggctcaggatgaacgctggcggcgtgcttaacacatgcaagtcgaacggagtattagattttttaatacttagtggcggacgggtgagtaacgcgtgggtaacctgcctcacacagggggataacagttggaaacgactgttaataccgcataagaccacagtaccgcatggtacaggggtaaaaactccggtggtgtgagatggacccgcg

SEQ ID NO: 1370 - DNA, 225 bp, Unknown
  Encodes 16S rRNA from Spirochaeta
agagtttgatcatggctcagaacgaacgctggcggcgcgtcttaagcatgcaagtcgagcgggaaacagtagcttgctactgttgagagcggcggactggtgagtaacacgtgggtgacgcacccctgtgagggggacagccggcagaaatgccgggtaataccgcatacgattgccttaagtgatgttgaggcaatgaaaggagcgaatgctccgcgcagggag

SEQ ID NO: 1371 - DNA, 225 bp, Unknown
  Encodes 16S rRNA from Clostridium XlVb
agagtttgatcctggctcaggatgaacgctggcggcgtgcctaacacatgcaagtcgaacgagagaagcgaaaagcttgctttttgccgatcgagtggcggacgggtgagtaacgcgtgagcaacctgccttacattggggaataacgtttggaaacggacggtaataccgcatatgcagacaagtacggcatcgtacggtttggaaagatttatcgatgtaaga

SEQ ID NO: 1372 - DNA, 225 bp, Unknown
  Encodes 16S rRNA from Oscillibacter
agagtttgatcatggctcaggacgaacgctggcggcgtgcttaacacatgcaagtcgaacggggcgcagcgacggaagttttcggacggaagacgctgttgccaagtggcggacgggtgagtaacgcgtgaggaacctgcctttcagagggggacaacagttggaaacgactgctaataccgcataatgcggcgagacggcatcgtcttgccgccaaaggagcaa

SEQ ID NO: 1373 - DNA, 225 bp, Unknown
  Encodes 16S rRNA from Prevotella
agagtttgatcatggctcaggatgaacgctagctacaggcttaacacatgcaagtcgaggggcagcatggcggtggcttgccaccgccgatggcgaccggcgcacgggtgagtaacgcgtatccaacctgcccgcaaccgcggaatagcccgccgaaaggcggattaatgccgcatgagcccgcgagacggcatcagcgcgcgggcaaaggtatattccggttgt

SEQ ID NO: 1374 - DNA, 225 bp, Unknown
  Encodes 16S rRNA from Anaeroplasma
agagtttgatcctggctcaggattaacgctggcggcgtgcctaatacatgcaagtcgaatggtggtagcaatacaaaccatggcgaacgggtgagtaacacgtaggtaacctatcttaaagacgaggataaccattggaaacgatggataatactggataggacatcataaagggcatccttagatgtttaaaggagcaatccacttttagaggggcctgcggcg

SEQ ID NO: 1375 - DNA, 225 bp, Unknown
  Encodes 16S rRNA from Adlercreutzia
agagtttgatcatggctcaggatgaacgctggcggcgtgcttaacacatgcaagtcgaacggttaaaccggcttcggccggacatagagtggcgaacgggtgagtaacacgtgaccaacctgccccgcgcaccgggacagcctcgcgaaagcgggattaataccggatactccggcgggggcgcatgcccccgccgggaaagctccggcggcgcgggatggggtc

SEQ ID NO: 1376 - DNA, 225 bp, Unknown
  Encodes 16S rRNA from Clostridium XlVa
agagtttgatcatggctcaggatgaacgctggcggcgtgcttaacacatgcaagtcgaacgaagcattacgtttcaaagcctccgggcagcgagatgttttgacttagtggcggacgggtgagtaacgcgtgggtaacctgccttgtactgggggataacagttagaaatgactgctaataccgcataagcccacggtttcgcatggaactgtgagaaaagattt

SEQ ID NO: 1377 - DNA, 225 bp, Unknown
  Encodes 16S rRNA from Beijerinckia
agagtttgatcatggctcagaacgaacgctggcggcaggcttaacacatgcaagtcgaacgccccgcaaggggagtggcagacgggtgagtaacgcgtgggaatctaccgtgccctgcggaatagctccgggaaactggaattaataccgcatacgccctacgggggaaagatttatcggggtatgatgagcccgcgttggattagctagttggtggggtaaagg

SEQ ID NO: 1378 - DNA, 225 bp, Unknown
  Encodes 16S rRNA from Prevotella
agagtttgatcatggctcaggatgaacgctagctacaggcttaacacatgcaagtcgaggggcagcatgtcggtggcttgccaccggcgatggcgaccggcgcacgggtgagtaacgcgtatccaacctgcccgcaaccgcggaatagcccgccgaaaggcggattaatgccgcatgagctcgcgcgagggcatctgatcgcgagcaaaggttgattccggttgc

SEQ ID NO: 1379 - DNA, 225 bp, Unknown
  Encodes 16S rRNA from Coprococcus
agagtttgatcatggctcaggatgaacgctggcggcgtgcctaacacatgcaagtcgaacgaagcacttctcccgtcaaaggtgattagcttgctatgaagcggagacatttgaagtgacttagtggcggacgggtgagtaacgcgtgggtaacctgccccataccgggggacaacagttggaaacggctgctaataccgcataagcgcacgatgtcgcatggca

SEQ ID NO: 1380 - DNA, 225 bp, Unknown
  Encodes 16S rRNA from Lentisphaera
agagtttgatcatggctcagaatgaacgctggcggcatggattaggcatgcaagtcgaacgagaaagcggcctcggccgcgagtaaagtggcgaaagggtgagtagcacgtggggaacctgccccggggaccggaacaagcccgtgaaaacgggtctgaaaccggatgtcgccccggcccgcatgggccggaggcgaaaaattcattgccccgggatggccccgc

SEQ ID NO: 1381 - DNA, 225 bp, Unknown
  Encodes 16S rRNA from Clostridium XlVa
agagtttgatcctggctcaggatgaacgctggcggcgtgcttaacacatgcaagtcgaacggagatatatttatgaagttttcggatggaatatatatatcttagtggcggacgggtgagtaacgcgtaaacaatctgccttagagagggggataacagatagaaatatctgctaataccgcataagaccacgtacaggcatctagacggggtaaaaggagtaat

SEQ ID NO: 1382 - DNA, 225 bp, Unknown
  Encodes 16S rRNA from Saccharofermentans
agagtttgatcatggctcaggacgaacgctggcggcgtgcctaacacatgcaagtcgagcggactctttacaggaaagtgcttgcaccggaatgtaaagagttagcggcggacgggtgagtaacgcgtgagcaatctgtcccatacagggggataataccgcgaaagaggttctaataccgcatgagaccacagtgaggcatctcacaggggtcaaaggagcaat

SEQ ID NO: 1383 - DNA, 225 bp, Unknown
  Encodes 16S rRNA from Porphyrobacter
agagtttgatcatggctcagaacgaacgctggcggcatgcctaacacatgcaagtcgaacgagaccttcgggtctagtggcgcacgggtgcgtaacgcgtgggaacctgcccttaggttcggaataactccccgaaaggggtgctaataccggataatgtcttcggaccaaagatttatcgcctttggatgggcccgcgttggattagcttgttggtgaggtaac

SEQ ID NO: 1384 - DNA, 225 bp, Unknown
  Encodes 16S rRNA from Rhodobacter
agagtttgatcatggctcagaatgaacgctggcggcaggcctaacacatgcaagtcgaacgaagtcttcggacttagtggcggacgggtgagtaacacgtgggaacgtaccctttgctacggaatagcctcgggaaactgggagtaataccgtatgtgcccttcgggggaaagatttatcggcaaaggatcggcccgcgttggattagctagttggtggggtaat

SEQ ID NO: 1385 - DNA, 225 bp, Unknown
  Encodes 16S rRNA from Oscillibacter
agagtttgatcctggctcaggacgaacgctggcggcgtgcctaacacatgcaagtcgaacgagaatctaatgacggagttttcggacaactgagttagaggaaagtggcggactggtgagtaacgcgtgagcaacctgcctttcagagggggacaacagttggaaacgactgctaataccgcataacatacacatgaggcatctcgagtgtatcaaaggagcaat

SEQ ID NO: 1386 - DNA, 225 bp, Unknown
  Encodes 16S rRNA from Roseburia
agagtttgatcatggctcaggatgaacgctggcggcgtgcttaacacatgcaagtcgaacggggtattaacgctgaacgagcgaatagcttgctaggaacgagttcttgttaagacctagtggcggacgggtgagtaacgcgtgggtaacctgcccattaccgggggacaacagttggaaacgactgctaataccgcataagcgcacggggacgcatgtttctgt

SEQ ID NO: 1387 - DNA, 225 bp, Unknown
  Encodes 16S rRNA from Prevotella
agagtttgatcctggctcaggatgaacgctagctacaggcttaacacatgcaagtcgaggggcatcaggaggtcagcttgctgaccttgctggcgaccggcgcacgggtgagtaacacgtatccaacctgccctgtacacggggatagccctctgaaaggaggattaatacccgatgttgtcgcggagggacatccctctgcgaccaaagtctcaacggtacggg

SEQ ID NO: 1388 - DNA, 225 bp, Unknown
  Encodes 16S rRNA from Aquiflexum
agagtttgatcatggctcaggatgaacgctggcggcaggcttaatacatgcaagtcgaacggtaaggccgagcgtagcaatacgcgaggtacacgagtggcgcacgggtgcgtaacgcgtatgcaacctgcccccttccgggacaaaacgtcgagaaattggcgctaatatcccatggcgaccttatgaggcatctcgtttggtccaaagattcattggaagggg

SEQ ID NO: 1389 - DNA, 225 bp, Unknown
  Encodes 16S rRNA from Rhodopirellula
agagtttgatcatggctcagaatgaacgttggcggcgtggattaggcatgcaagtcgtacggtaagccccatagcttgctacggggcctagagtggcgaaagggataggataatgtagatgacataccctcgggaccgggatagcgtttggaaacgaacggtaataccggataacatctccggatcaaaggtgagattccgcctgaggattggtttacacactat

SEQ ID NO: 1390 - DNA, 225 bp, Unknown
  Encodes 16S rRNA from Bacteroides
agagtttgatcctggctcaggatgaacgctagctacaggcttaacacatgcaagtcgaggggcagcattaagtcagcttgctgatttagatggcgaccggcgcacgggtgagtaacgcgtatccaacctgccccctacccggggatagccttgcgaaagtaagattaatacccggtgctgttatgatcccgcatggggatataacgaaagattcatcggtagggg

SEQ ID NO: 1391 - DNA, 225 bp, Unknown
  Encodes 16S rRNA from Bacteroides
agagtttgatcctggctcaggatgaacgctagctacaggcttaacacatgcaagtcgaggggcagcatggccgaagcttgcttcggccgatggcgaccggcgcacgggtgcgtaacacgtatccaatctacccgtcacttggggataggctttcgaaagaaagattaatacccgatggtatgtccatgccgcatgacgtggacattaaagatttatcggtgtcgg

SEQ ID NO: 1392 - DNA, 225 bp, Unknown
  Encodes 16S rRNA from Clostridium XlVa
agagtttgatcatggctcaggatgaacgctggcggcgtgcctaacacatgcaagtcgaacggagatgtgcaccgaatgaggattcgtctgatttcaccgcgcatctgagtggcggatgggtgagtaacgcgtggataacctgcccttcactgggggataacaaccggaaacgggtgctaataccgcataggcgcacgaagtcgcatgactttgagcgtaaagatt

SEQ ID NO: 1393 - DNA, 225 bp, Unknown
  Encodes 16S rRNA from Clostridium IV
agagtttgatcctggctcaggatgaacgctggcggcgtgcctaatacatgcaagtcgaacggagcaccttggtgctcagtggcgaacgggtgaggagaacataggtaacctgcccctccgagggggacaacagctggaaacggctgctaagaccgcatagacgcattcagggcatcctggatgcgctaaatgaccggatggtcagcggggggatggacctatgca

SEQ ID NO: 1394 - DNA, 225 bp, Unknown
  Encodes 16S rRNA from Prevotella
agagtttgatcctggctcaggatgaacgctagcggcaggcctaacacatgcaagtcgaggggcagcgcgggatagcaatatcctggcggcgaccggcagaagggtgcgtaacgcgtgagcgacatgcccgtcaccgggggacaagcgctggaaacggcgtctaataccccatatgcctggggagtgcatgcttccttggtgaaagtttcgacggtgacggattgg

SEQ ID NO: 1395 - DNA, 225 bp, Unknown
  Encodes 16S rRNA from Mogibacterium
agagtttgatcatggctcaggatgaacgctggcggcgtgcctaatacatgcaagtcgagcgagaaattactttgacgcgttttcggacaagtctgtgtaatggaaagcggcggacgggtgagtaacgcgtaggcaacctgcccttagcagagggatagccattggaaacgatgattaaaacctcataatgctgcactaacacatgttagagcagccaaagattta

SEQ ID NO: 1396 - DNA, 225 bp, Unknown
  Encodes 16S rRNA from Prevotella
agagtttgatcatggctcaggatgaacgctagctacaggcttaacacatgcaagtcgaggggaaacgatatcgaaagcttgctttcgataggcgtcgaccggcgcacgggtgagtaacgcgtatccaacctgcctggaaatagggaataatccgtggaaacgcggcctaatgtcctatgtgctccgaagaggacatctgatttggagtaaagatttatcgtttcc

SEQ ID NO: 1397 - DNA, 225 bp, Unknown
  Encodes 16S rRNA from Clostridium XlVa
agagtttgatcatggctcaggatgaacgctggcggcgtgcttaatacatgcaagtcgaacggagatattccaccgagagaagctgagtgcttgcacaaggccaatctcaccggattatcttagtggcggacgggtgagtaacgcgtgggtaacctgccttatacaggggaataacagccagaaatgactgctaataccgcataagcgcacgagaccgcatggtca

SEQ ID NO: 1398 - DNA, 225 bp, Unknown
  Encodes 16S rRNA from Prevotella
agagtttgatcctggctcaggatgaacgctagctacaggcttaacacatgcaagtcgaggggaaacggtagtgggtggcttgccacccgctggacgtcgaccggcggatgggtgcgtaacgcgtatccaacctgccgcagtcccggggatagcccgtggaaacgcggattaacacccgatggtgcatacgttccgcatggcgcgtatgccaaatgcgaaggactg

SEQ ID NO: 1399 - DNA, 225 bp, Unknown
  Encodes 16S rRNA from Capnocytophaga
agagtttgatcctggctcaggatgaacgctagcggcaggcctaacacatgcaagtcgaggggcagcgcggtgcagcaatgcactggcggcgaccggcgcacgggtgcgtaacgcgtatgcaacccacccgcaacaggggtataacggagggaaacttccactaatcccccatattgccgtcatcccgcatggggaggcggcgaaagcttcggcggttgcggacgg

SEQ ID NO: 1400 - DNA, 225 bp, Unknown
  Encodes 16S rRNA from Acholeplasma
agagtttgatcatggctcaggatgaacgctggcggcgtgcctaatacatgcaagtcgaacgggagtgcttgcactccagtggcgaacgggtgagtaacacgtaggtaatctagcattaagacgaggatagcttctagaaatgggagataatactggataggaaattttcctgcatggggaaatttttaaagatttatcgcttaatggggagcctgcggtgcatta

SEQ ID NO: 1401 - DNA, 225 bp, Unknown
  Encodes 16S rRNA from Clostridium IV
agagtttgatcctggctcaggacgaacgctggcggcgtgcctaacacatgcaagtcgaacggagttattagagtgaagttttcggatggagcgataataacttagtggcggacgggtgagtaacgcgtgagtaacctgcccatcagagggggataacgttctgaaaagaacgctaataccgcataacatatttggttcgcatggactgaatatcaaaggagcaat

SEQ ID NO: 1402 - DNA, 225 bp, Unknown
  Encodes 16S rRNA from Succinivibrio
agagtttgatcatggctcagattgaacgctggcggcaggcctaatacatgcaagtcgaacggtaacatggaagtagcaatacttttgatgacgagtggcggacgggtgagtaatacgtagataatctgccttctagagggaaataacagagagaaatttctgctaatgtcccataagaccacactatggcatcttagagtgatcaaaggagtaatccgctagaag

SEQ ID NO: 1403 - DNA, 225 bp, Unknown
  Encodes 16S rRNA from Pseudonocardia
agagtttgatcctggctcaggacgaacgctggcggcgtgcttaatacatgcaagtcgagcgagctacttcggtagcgagcggcgcacgggtgagtaacgcgtagatgatctaccctcgagactgagatacctctgggaaactggagttaataccagataacgcacattggttggttctgatgtgttaaagcggtgcaagtcgcacttgaggatgagtctgcggcc

SEQ ID NO: 1404 - DNA, 225 bp, Unknown
  Encodes 16S rRNA from Clostridium XlVa
agagtttgatcctggctcaggatgaacgctggcggcgtgcttaacacatgcaagtcgaacggacatggcaccggagcagaagagttcgcttggacgctccaccgtcatgttagtggcggacgggtgagtaacgcgtgagcaaccaaccctatgcagggggataacagttagaaatgactgctaataccgcataagcccacagcatcgcatggtgcagggggaaaa

SEQ ID NO: 1405 - DNA, 225 bp, Unknown
  Encodes 16S rRNA from Butyricimonas
agagtttgatcctggctcaggatgaacgctagcgacaggcttaacacatgcaagtcgaggggcagcatggcggtagcaatactgctgatggcgaccggcgcactggtgagtaacacgtatgcaacctgccccgcgcagggggataatccggagaaatctggtctaataccccgtacgccgcgcttccgcatggtagtgcggtgaaaggagcgatccggcacggga

SEQ ID NO: 1406 - DNA, 225 bp, Unknown
  Encodes 16S rRNA from Anaerovorax
agagtttgatcctggctcaggatgaacgctggcggcgtgcctaacacatgcaagtcgagcgggaaatacagaacagaaggttcgctggaagttttgtatggagagcggcggacgggtgagtaacgcgtaggcaacctgccctttgcagagggatagccactggaaacggtgattaaaacctcataatgccattgattcacatgtttcgatggccaaagatttatc

SEQ ID NO: 1407 - DNA, 225 bp, Unknown
  Encodes 16S rRNA from Prevotella
agagtttgatcctggctcaggatgaacgctagctacaggcttaacacatgcaagtcgaggggtaacgtgagggaagcttgcttcccttgacgacgaccggcgaatgggtgagtaacgcgtatccaacctgccgcacgcccgggaacagcccttggaaacgaggattaaatcccgataccttatgctgctgcatggtggtataagaaaacaggcatgcgatgggga

SEQ ID NO: 1408 - DNA, 225 bp, Unknown
  Encodes 16S rRNA from Butyricimonas
agagtttgatcctggctcaggatgaacgctagcgacaggcttaacacatgcaagtcgaggggcagcatgagggtagcaataccttcgatggcgaccggcgcactggtgagtaacacgtatgcaacctgcccttgtcagggggataatccggggaaacccggtctaataccgcataacaccttggggggcctccccttaggttgaaagatacgtcggacagggatg

SEQ ID NO: 1409 - DNA, 225 bp, Unknown
  Encodes 16S rRNA from Parabacteroides
agagtttgatcatggctcaggatgaacgctagcgacaggcttaacacatgcaagtcgaggggcagcggggcgtggcaacacgccgccggcgaccggcgcactggtgagtaacacgtatgcaacctgcccatgagagggggataacccgtggaaacgcggactaataccccgtaagccggcgtgccgcatggcatgttggtgaaaggagcgatccgttcatggatg

SEQ ID NO: 1410 - DNA, 225 bp, Unknown
  Encodes 16S rRNA from Clostridium XlVa
agagtttgatcatggctcaggatgaacgctggcggcgtgcctaacacatgcaagtcgaacggagtaccaccggactgagattcgtcgaaggaaggtgactacttagtggcggacgggtgagtaacgcgtgggtaacctgcctcatagagggggacaacagttggaaacgattgctaataccgcataagcccgcagtaccgcatggtacagagggaaaagattcat

SEQ ID NO: 1411 - DNA, 225 bp, Unknown
  Encodes 16S rRNA from Clostridium XlVb
agagtttgatcatggctcaggatgaacgctggcggcgtgcttaacacatgcaagtcgaacgaagaggtgctgagggataggcttcggctttgaacacggcgcatatcttagtggcggacgggtgagtaacgcgtgggcaacctgccctttacaggggaataatcattggaaacgatgactaataccgcatgtcaccgtgagatggcatcattttacgggaaaagg

SEQ ID NO: 1412 - DNA, 225 bp, Unknown; identical to SEQ ID NO: 100
  Encodes 16S rRNA from Bacteroides

SEQ ID NO: 1413 - DNA, 225 bp, Unknown
  Encodes 16S rRNA from unknown taxa
agagtttgatcctggctcaggacgaacgctggcggcgtgcttcatacatgcaagtcgaacgagaagtcaccttcgggtgatggatagtggcggacgggtgagtaatgtgtagagaatctgccctagagagggggatagcagttggaaacgactattaataccccatatgcgcgtagttgcgatactattcgtgaaagattaatcgctctaggatgagtctgcatc

SEQ ID NO: 1414 - DNA, 225 bp, Unknown
  Encodes 16S rRNA from Riemerella
agagtttgatcatggctcaggatgaacgctagcgggaggcctaacacatgcaagccgagcggtagaaagtagcttgctacttttgagagcggcgtacgggtgcgtaacacgtgtgcaacctgcctttatctggagaatagcctttcgaaaggaagattaatgctccataacatattgaatggcatcatttaatattgaaagctgcggcggatagagatgggcacg

SEQ ID NO: 1415 - DNA, 225 bp, Unknown
  Encodes 16S rRNA from Anaeroplasma
agagtttgatcatggctcaggattaacgctggcggcgtgcctaatacatgcaagtcggatggttagcttgctaaccatggcgaacgggtgagtaacacgtaggtaacctgtcttttagccgaggataaccattggaaacgatggataatactggataggacatttgaaggcatctttagatgtttaaagatttatcactagaagaggggcctgcggcgcattagc

SEQ ID NO: 1416 - DNA, 225 bp, Unknown
  Encodes 16S rRNA from Ruminococcus
agagtttgatcctggctcaggacgaacgctggcggcgtgcctaacacatgcaagtcgaacggagctgaagagcttgcttttcagcttagtggcggacgggtgagtaacgcgtgagtaacctgcctccgagagtggaataacgttttgaaaagaacgctaataccgcataacgcacaagagtcgcatggctaaagtgccaaagatttcatcgctcggagatggact

SEQ ID NO: 1417 - DNA, 225 bp, Unknown
  Encodes 16S rRNA from unknown taxa
agagtttgatcctggctcagaacgaacgctggtagcgtggattaggcatgcaagtcgaacgggatcgcccgattagcaataaccgggcgtgagagtggcggattggggaggaacacgtgagcaacctgcccttgagttggggaaaaccgttggaaacgacggctaataccggatgtggcgcccgacgacatcgtcggagcgctaaagggggccgcaaggctcccg

SEQ ID NO: 1418 - DNA, 225 bp, Unknown
  Encodes 16S rRNA from Lachnospiracea incertae sedis
agagtttgatcctggctcaggatgaacgctggcggcgtgcttaatacatgcaagtcgaacgaagcacccctcccgatgatatgacgagcttgctctgaattgaatcacctggggtgactgagtggcggacgggtgagtaacgcgtgggtaacctacctatgacagggggatagcagttggaaacgactgataataccgcataagtgcacagtatcgcatgataca

SEQ ID NO: 1419 - DNA, 225 bp, Unknown
  Encodes 16S rRNA from Syntrophococcus
agagtttgatcctggctcaggatgaacgctggcggcgtgcctaacacatgcaagtcgaacgaggctcttttctttgaagtttcgaccgaaaagagaagatcaccgagtggcggatgggtgagtaacgcgtggagaacctacccttatcagggggataacaactggaaacggttgacaataccgcatatatgagcagaccgcatgatcagctcaggaaagatttat

SEQ ID NO: 1420 - DNA, 225 bp, Unknown
  Encodes 16S rRNA from Clostridium IV
agagtttgatcatggctcaggatgaacgctggcggcgtgcataacacattcaagtcgaacgaagcactttggacggaacccttcggggggaagactgatttgactgagtggcggacgggtgagtaacgcgtgagcaacctgccttgaagagggggataacacagggaaacttgtgctaataccgcataacatatcgtgatcgcatggtcgtggtatcaaagctcc

SEQ ID NO: 1421 - DNA, 225 bp, Unknown
  Encodes 16S rRNA from Barnesiella
agagtttgatcatggctcaggatgaacgctagcgacaggcctaacacatgcaagtcgaggggcagcgcgttggtagcaataccgatggcggcgaccggcgcacgggtgcgtaacaggtgtgcaatctgtccatagtcggaggatagcccgctgaaaggcggattaatactccatgtgagttgaagccgcatggttttaatttgaaacgcgaggactatggttgag

SEQ ID NO: 1422 - DNA, 225 bp, Unknown
  Encodes 16S rRNA from Olivibacter
agagtttgatcctggctcaggatgaacgctagcggcaggcttaacacatgcaagtcgaggggcagcgcgttgtagcaatacaatggcggcgaccggcggaagggtgcgtaacgcgtgagcaacctgcccctgtcagggggatagtcgatggaaacgtcgcgtaataccccgtacgatgcgtgaccgcatggtcgtgcattgaaagatttatcggacagggatggg

SEQ ID NO: 1423 - DNA, 225 bp, Unknown
  Encodes 16S rRNA from Clostridium XlVa
agagtttgatcatggctcaggatgaacgctggcggcgtgcttaatacatgcaagtcgaacgaagcactttttccggaagccctcgggccgaaggaagctgtgacttagtggcggacgggtgagtaacgcgtgggtaacctgcctcatacagggggacaacagttggaaacggctgctaataccccataagcgcacaacatcgcatggtgatgtgtgaaaagattt

SEQ ID NO: 1424 - DNA, 225 bp, Unknown
  Encodes 16S rRNA from Cryptanaerobacter
agagtttgatcatggctcaggacgaacgctggcggcgtgcttaacacatgcaagtcgaacggacgaatgtttttgcactcagtatgttgtaaaatatattgagtgcagaaatatgagttagtggcggactggtgagtaacgcgtgagcaacctgcctttaactggggaataccacttagaaataggtgctaataccgcataacattgcactgtggcatcacagag

SEQ ID NO: 1425 - DNA, 225 bp, Unknown
  Encodes 16S rRNA from Saccharofermentans
agagtttgatcatggctcaggacgaacgctggcggcgtgcctaacacatgcaagtcgagcggactttcatcaggaaggtgcttgcactggaaagatgagagttagcggcggacgggtgagtaacgcgtgagcaatctgtcccatacagggggataataccgcgaaagaggttctaataccgcatgagaccacggtgaggcatctcacaggggtcaaaggagcaat

SEQ ID NO: 1426 - DNA, 225 bp, Unknown
  Encodes 16S rRNA from Clostridium IV
agagtttgatcatggctcaggatgaacgctggcggcgtgcataacacattcaagtcgaacgaagcactgtcgaggaagtcttcggatggaattgactttgacttagtggcggacgggtgagtaacgcgtgagcaaccttcctggtagtgagggataacacagggaaacttgtgctaataccgcatgacgcatgattgtcgcatggcagacatgccaaagacatgt

SEQ ID NO: 1427 - DNA, 225 bp, Unknown
  Encodes 16S rRNA from Coprococcus
agagtttgatcatggctcaggatgaacgctggcggcgtgcttaacacatgcaagtcgaacggagtttagcgcttccgaagcttcggcagaggattgttaaacttagtggcggacgggtgagtaacgcgtgggtaacctgccatgtacagggggataacacttagaaataggtgctaataccgcataagcgcacatgatcgcatgatcaggtgtgaaaaactgagg

SEQ ID NO: 1428 - DNA, 225 bp, Unknown
  Encodes 16S rRNA from Barnesiella
agagtttgatcctggctcaggatgaacgctagcgacaggcctaacacatgcaagtcgaggggcagcgggagtgaagcttgcttcacttgccggcgaccggcgcacgggtgagtaacgcgtatgcaacctgcctgtaacagggggataacccggagaaatccggactaagaccgcataacgctgagaagccgcatgacttttcagccaaatattcataggttacag

SEQ ID NO: 1429 - DNA, 225 bp, Unknown
  Encodes 16S rRNA from Clostridium sensu stricto
agagtttgatcatggctcaggacgaacgctggcggcgtgcctaacacatgcaagtcgagcggagacatatcacggaaggattcgtccggaaggggtatgtttgagcggcggacgggtgagtaacgcgtgatgaacctgtccttcacagggggataagacatcgaaaggtgttctaataccgcataggaccacggtaccgcatggtacaggggtgaaaggagcgat

SEQ ID NO: 1430 - DNA, 225 bp, Unknown
  Encodes 16S rRNA from Hydrogenoanaerobacterium
agagtttgatcatggctcaggagaaacgctggcggcgcacataagacatgcaagtcgaacggaatttagccaaatgtttacatgaggcgaagatttagtggcggacgggtgagtaacacgtgagcaacctaccttgaagagggggataacattgagaaatcagtgctaataccgcataacacttcatattcacatgaataagaagtcaaaggagaaatccgcttt

SEQ ID NO: 1431 - DNA, 225 bp, Unknown
  Encodes 16S rRNA from Clostridium XlVb
agagtttgatcatggctcaggatgaacgctggcggcgtgcttaacacatgcaagtcgagcgaagttattagagcttgctttgataacttagcggcggacgggtgagtaacgcgtgggtaacctgccctgtacagaggaataacagttagaaatgactgctaatacctcataagccgacggaatggcatcattttgtcggaaaagatttatcggtacaggagggac

SEQ ID NO: 1432 - DNA, 225 bp, Unknown
  Encodes 16S rRNA from Selenomonas
agagtttgatcctggctcaggacgaacgctggcggcgtgcttaacacatgcaagtcgaacggagctgaatagcttgctatgaaagcttagtggcaaacgggtgagtaacgcgtgggcaacctgccggaaagatggggacaacatcccgaaaggggtgctaataccgaatgttgtatatagagcgcatgctctgtatattaaaggatactatccgctttccgatgg

SEQ ID NO: 1433 - DNA, 225 bp, Unknown
  Encodes 16S rRNA from Prevotella
agagtttgatcctggctcaggatgaacgctggcggcgtgcctaacacatgcaagtcgaggggcatcaggacggtagcttgctatcgttgctggcgaccggcgcacgggtgagtaacgcgtatccaaccttcccatgactccggttcagcccgccgaaaggcggattactcccggatggtttccgaagagggcatctgatttggaataaagattgatcggtcatgg

SEQ ID NO: 1434 - DNA, 225 bp, Unknown
  Encodes 16S rRNA from Hydrogenoanaerobacterium
agagtttgatcatggctcaggacgaacgctggcggcgcgcctaacacatgcaagtcgaacgggactagtgaccggaggatagatgaagtttatcttgcgatcactagttcagtggcggacgggtgagtaaagcatgagcaacttgcctgatagagggggatagcttttggaaacagaagataataccgcatacttcaaaagtttcgcatggagtttttggaaaag

SEQ ID NO: 1435 - DNA, 225 bp, Unknown
  Encodes 16S rRNA from Spirochaeta
agagtttgatcctggctcagaacgaacgctggcggcgcgtcttaagcatgcaagtcgagcggtaacttaccttcgggtaagctagagcggcggactggtgagtaacacgtgggtgacataccctccggatcgggatagctcctagaaataggagataataccgggtacgaccactacggtcagagcgtagtgaggaaaggtgcattagcaccgccggaggagtgg

SEQ ID NO: 1436 - DNA, 225 bp, Unknown
  Encodes 16S rRNA from Enterorhabdus
agagtttgatcatggctcaggatgaacgctggcggcgtgcttaacacatgcaagtcgaacgattaacccgccttcgggcggtcatagagtggcgaacgggtgagtaacacgtgaccaacctgccccgcgcaccgggacagcctcgcgaaagcgggattaataccggatactccgcaccccccgcatggggggtgcgggaaagctccggcggcgcgggatggggtc

SEQ ID NO: 1437 - DNA, 225 bp, Unknown
  Encodes 16S rRNA from Thermoanaerobacter
agagtttgatcctggctcaggatgaacgctggcggcgcgcctaacacatgcaagtcgagcggcgaaggggattcgtccccggaccagcggcgaacgggtgagtaacgcgtgggcaacctgccccgggcccggggatagcggggggaaacccccggtaagacccgacgcgcccggaggggggcatccccctccgggcgaaggagacggcccgggatgggcccgcgt

SEQ ID NO: 1438 - DNA, 225 bp, Unknown
  Encodes 16S rRNA from unknown taxa
agagtttgatcatggctcaggacgaacgctagcgacgtgtctaagaaatgcaagtcgggcgatgacggaggcttcggcctcccgattagcggcgaacggtcgcgtaacacgtaagcaatctgccccaaagttcgggatagcccggcgaaagtcggattaataccggatgtggatgtttttgcgcatgcatttgcatctaaagcagcgatgcgctttgggatgagc

SEQ ID NO: 1439 - DNA, 225 bp, Unknown
  Encodes 16S rRNA from Syntrophococcus
agagtttgatcatggctcaggatgaacgctggcggcgtgcttaacacatgcaagtcgaacgggaactctgaactgaaggttcgctggatgtttagaaattctagtggcggacgggtgagtaacgcgtgggtaacctgcctataagacgtgaacaacagttagaaatgactgctaatacacgataagcacacagtattgcatgatacagtgtgaaaagaatttcgc

SEQ ID NO: 1440 - DNA, 225 bp, Unknown
  Encodes 16S rRNA from Sphingobium
agagtttgatcatggctcagagtgaacgctagcggaatgctttatacatgcaagtcgaacggagttttattgtgaagtagcaatatggaatagtaaaacttagtggcgaactggcgagtaatagttaggaacttaccgagtagtgggggacaacagttagaaatgactgctaataccgcatacgcccgagaggggaaagatttatcgctatttgagaggcctaac

SEQ ID NO: 1441 - DNA, 225 bp, Unknown
  Encodes 16S rRNA from Clostridium XlVa
agagtttgatcatggctcaggatgaacgctggcggcgtgcctaacacatgcaagtcgaacgaagctcactttttgaattcttcggaaggaaaaaagagaagacttagtggcggacgggtgagtaacgcgtgggtaatctgccctgtacagggggacaacagttagaaatgactgctaataccgcataagcgtacggtaccgcatggtacagtacgaaaaactgag

SEQ ID NO: 1442 - DNA, 225 bp, Unknown
  Encodes 16S rRNA from Geosporobacter
agagtttgatcctggctcaggatgaacgctggcggcgtgcctaacacatgcaagtcgagcgggaatctcctgattgaaacttcggtagatagacggagaggatagcggcggacgggtgagtaacgcgtaggtaagctgccctatgcacagggatagcctagggaaacctggattaatacctgatgacgctgcgaggtcacatggccatgcagccaaagtttttcg

SEQ ID NO: 1443 - DNA, 225 bp, Unknown
  Encodes 16S rRNA from Enterorhabdus
agagtttgatcatggctcaggatgaacgctggcggcgtgcctaacacatgcaagtcgaacggttaagccggcttcggccgggcatacagtggcgaacgggtgagtaacacgtgaccaacctgccccgcgcaccgggacagccccccgaaagggggattaataccggatactccgcctcccccgcatgaggggggcgggaaagctccggcggcgcgggatggggtc

SEQ ID NO: 1444 - DNA, 225 bp, Unknown
  Encodes 16S rRNA from unknown taxa
agagtttgatcctggctcagaacgaacgctggtagcgtggattaggcatgcaagtcgaacgggatccgggaggtagcaatacttcctggtgagagtggcggattggggaggaacacgtgagcaacctgcctttgagtcggggaaaaccgttggaaacgacggctaataccggatgtggcgcccggtgacatcactggagcgctaaagggggccgcaaggctctcg

SEQ ID NO: 1445 - DNA, 225 bp, Unknown
  Encodes 16S rRNA from Clostridium XlVa
agagtttgatcctggctcaggatgaacgctggcggcgtgcctaacacatgcaagtcgaacggagtacagacgctgtgagaggaagtgcttgcacagacttgaacttgtttgtacttagtggcggacgggtgagtaacgcgtggaaaacctgcctcatacagggggataacagggagaaattcctgctaataccgcataagcgcacggaaccgcatggttcagtgt

SEQ ID NO: 1446 - DNA, 225 bp, Unknown
  Encodes 16S rRNA from Parabacteroides
agagtttgatcctggctcaggatgaacgctagcgacaggcttaacacatgcaagtcgaggggcagcgcggcgtgagcaatcatgctggcggcgaccggcgcactggtgagtaacacgtatgcaacctgccccctgccggggaataaaccagggaaacttggcctaatgccgcataacacgccttccggcatcggtaggcgttgaaagctccggcggcaggggatg

SEQ ID NO: 1447 - DNA, 225 bp, Unknown
  Encodes 16S rRNA from Cryptanaerobacter
agagtttgatcatggctcaggacgaacgctggcggcgtgcttaatacatgcaagtcgaacggatatgtagcaatacatattagtggcggacgggtgagtaacgcgtaatcaacctgccttttacaggggaataacacttggaaacaggtgctaataccgcatatgaccacaacacggcatcgtgaaggggtaaaagttttatcggtaaaagagggggttgcgtat

SEQ ID NO: 1448 - DNA, 225 bp, Unknown
  Encodes 16S rRNA from Anaeroplasma
agagtttgatcctggctcaggattaacgctggcggcgtgcctaatacatgcaagtcgaatggttagcttgctaaccatggcgaacgggtgagtaacacgtaggcaacctgactataagacgaggataaccattggaaacgatggataatactggataggatatagatgggcatccatttatatttaaagatttatcacttaatgaggggcctgcggcgcattagc

SEQ ID NO: 1449 - DNA, 225 bp, Unknown
  Encodes 16S rRNA from Spirochaeta
agagtttgatcatggctcagaacgaacgctggcggcgcgtcttaagcatgcaagtcgggcggcaagctgccttcgggcagcctagagcggcggactggtgagtaacgcgtgggtgacgcacccccttgacggggacagcccgcagaaatgcggggtaataccggataaggtccccggggttggagcccggggaggaaaggagctattgctccgcgaggggagcgg

SEQ ID NO: 1450 - DNA, 225 bp, Unknown
  Encodes 16S rRNA from Prevotella
agagtttgatcatggctcaggatgaacgctagctacaggcttaacacatgcaagtcgaggggcagcgggagagtagcttgctactcttgccggcgaccggcgaatgggtgagtaacgcgtatccaacctgccacatgcccgggaatagcccttggaaatgaggattaagtcccgatatgcttatttgtcgcatgacatgtaagtgaaacaggcatgtgatgggga

SEQ ID NO: 1451 - DNA, 225 bp, Unknown
  Encodes 16S rRNA from Roseburia
agagtttgatcatggctcaggatgaacgctggcggcgtgcttaacacatgcaagtcgaacggactctaagtagaaagcggagcttgctccaatggaaatttagagttagtggcggacgggtgagtaacgcgtgggtaacctgccttgcacagggggacaacagttggaaacgactgctaataccgcataagccggtagtgccgcatggcacattcggaaaagatt

SEQ ID NO: 1452 - DNA, 225 bp, Unknown
  Encodes 16S rRNA from Pedobacter
agagtttgatcctggctcaggatgaacgctagcggcaggcctaatacatgcaagtcgaacggtaagcggtccttcgggactgtgagagtggcggacgggtgcgtaacgcgtatgcaaccaacccccgacgggcggatagccggtggaaacgccggataagccgccatgcggccgaggaggggcatccctctttggtcaaagcggagacgcggtgggggacgggca

SEQ ID NO: 1453 - DNA, 225 bp, Unknown
  Encodes 16S rRNA from Pedobacter
agagtttgatcatggctcaggatgaacgctagcggcaggcctaacacatgcaagtcgaggggcagcgcggtgcagcaatgcactggcggcgaccggcgcacgggtgcgtaacgcgtatgcaacccacccgcaacaggggtataacggagggaaacttccactaatcccccatattgccgtctttccgcatgggggggcggcgaaagcttcggcggttgcggacgg

SEQ ID NO: 1454 - DNA, 225 bp, Unknown
  Encodes 16S rRNA from Eggerthella
agagtttgatcctggctcaggatgaacgctggcggcgtgcttaacacatgcaagtcgaacgagaacgcaccttcgggtgctagtagagtggcgaacgggtgagtaacacgtgagcaacctgccttccacttcgggataacccagggaaacctgtgctaataccgaatactccgggacctccgcatgggggacccgggaaagcgcatacggtggaagatgggctcg

SEQ ID NO: 1455 - DNA, 225 bp, Unknown
  Encodes 16S rRNA from Prevotella
agagtttgatcctggctcaggatgaacgctagctacaggcttaacacatgcaagtcgaggggcagcatgaagtttgcttgcaaactttgatggcgaccggcgcacgggtgagtaacgcgtatccaacctgcccattacccggggatagcccgccgaaaggcgaattaatacccgatgtggtcccatgacggcatcagagtgggaccaaagtcttgtcggtaacgg

SEQ ID NO: 1456 - DNA, 225 bp, Unknown
  Encodes 16S rRNA from Rikenella
agagtttgatcctggctcaggatgaacgctagcggcaggcttaacacatgcaagtcgaggggcagcgcggagtagcaatactctggcggcgaccggcgcacgggtgcgtaacgcgtatgcaacctgcctgcgacagggggataacctggagaaattcggactaataccccataccacgcctggcggcatcgccgggcgttgaaaggagcgatccggtcgcagatg

SEQ ID NO: 1457 - DNA, 225 bp, Unknown
  Encodes 16S rRNA from Anaerophaga
agagtttgatcctggctcaggatgaacgctagcgacaggcttaacacatgcaagtcgaggggcagcgagtggcgttgttcgcaacgccatgtcggcgaccggcgcactggtgagtaacacgtatgcaacctgcccttcaccggggcataacccttggaaacgaggcctaattccccatatacagcattcgggcatccgtgagctgtgaaaggtttattccggtga

SEQ ID NO: 1458 - DNA, 225 bp, Unknown
  Encodes 16S rRNA from Spirochaeta
agagtttgatcctggctcagaacgaacgctggcggcgcgtcttaagcatgcaagtcgggcggcaagctgccttcgggcagcctagagcggcggactggtgagtaacgcgtgggtgacgcacccccttgacggggacagcccgcagaaatgcggggtaataccggataaggtccccggggccggagcccggggaggaaaggagctattgctccgcgaggggagcgg

SEQ ID NO: 1459 - DNA, 225 bp, Unknown
  Encodes 16S rRNA from Clostridium IV
agagtttgatcctggctcaggagaaacgctggcggcgcacataagacatgcaagtcgaacggaatttagccgaatgtttacatgaggcgaagatttagtggcggacgggtgagtaacacgtgagcaacctaccttagagagggggataacattgagaaatcagtgctaataccgcataacactatagtaccacatggtacattagtcaaaggagaaatccacttt

SEQ ID NO: 1460 - DNA, 225 bp, Unknown
  Encodes 16S rRNA from Weissella
agagtttgatcatggctcaggatgaacgctggcggcgtgcctaatacatgcaagtcgaacgctttgtgcttaattgatatgatgagcttgctctgatttgattttttgatttcaaagagtggcgaacgggtgagtaacacgtgggtaacctacctcttagcaggggataacatttggaaacaagtgctaataccgtataatatcaacaaccgcatggttgttgat

SEQ ID NO: 1461 - DNA, 225 bp, Unknown
  Encodes 16S rRNA from Butyricicoccus
agagtttgatcctggctcaggataaacgctggcggcgcacataagacatgcaagtcgaacgggaactttgttgaagttatctgatataaagttctagtggcggactggtgagtaatgtataagcaacctgcctacaagaggggaataacagtgagaaatcattgctaataccgcataagctgtgagaatggcatcattcaaacagaaaaggaagcaattctgctt

SEQ ID NO: 1462 - DNA, 216 bp, Unknown
  Encodes 16S rRNA from Hahella
agagtttgatcatggctcaggatgaacgctagcggcaggcttaacacatgcaagtcgagcgggaactctgatgcagccatgccgcgtgtgtgaagaaggccttcgggttgtaaagcactttagttttcgagaaagggtgctgttctaatagggcagtattcagatgttagaaaaagaataagtaccggcaaactccgtgccagcagccgcggtaat

SEQ ID NO: 1463 - DNA, 225 bp, Unknown
  Encodes 16S rRNA from Acholeplasma
agagtttgatcctggctcaggatgaacgctggcggcgtgcctaatacatgcaagtcgtacgctaaacttcggtttagagtggcgaacgggtgagtaacacgtaggtaacctgcccataagacgaggataactactggaaacggtagctaatactggatagtatatagaatcgcatgattttatatttaaagatgcgtttgcatcacttatggatggacctgcggc

SEQ ID NO: 1464 - DNA, 225 bp, Unknown
  Encodes 16S rRNA from Clostridium XlVa
agagtttgatcctggctcaggatgaacgctggcggcgtgcctaacacatgcaagtcgaacgaagaccccgaggcggagatttcggtcaaagccaagggaggactgagtggcggacgggtgagtaacgcgtggataacctgccccatacagggggatagcagttggaaacgactgataataccgcataagcgcacaagggagacatcttccagtgtgaaaagattt

SEQ ID NO: 1465 - DNA, 225 bp, Unknown
  Encodes 16S rRNA from Cellulosilyticum
agagtttgatcatggctcaggacgaacgctggcggcgtgcttaacacatgcaagtcgaacggagcgtacggacggaagttttcggacggaagactgtacgcttagtggcggacgggtgagtaacgcgtgagcaatctgcccataagagggggacaacagccggaaacagctgctaataccgcatgagaccacattaccgcatggtagaggggtcaaagaaattcg

SEQ ID NO: 1466 - DNA, 225 bp, Unknown
  Encodes 16S rRNA from unknown taxa
agagtttgatcatggctcagaacgaacgctggtagcgtggattaggcatgcaagtcgaacgggatccatgaagtagcaatacggattggtgagagtggcggaagggcgaggaacacgtgagcaacctgtccttgaggtggggaaaaccgttggaaacgacggctaataccgaatgtggcgcccggagacatctccggagcgctaaagggggccgcaaggctctcc

SEQ ID NO: 1467 - DNA, 225 bp, Unknown
  Encodes 16S rRNA from Clostridium XlVa
agagtttgatcctggctcaggatgaacgctggcggcgtgcctaacacatgcaagtcgaacggtgaaacagaagcggaggttttcggactgaagcatttgtggaacagtggcggacgggtgagtaacgcgtggataacctgccccatacagggggatagcagttggaaacgactgataataccgcataagcgcacagcaccacatggtggagtgtgaaaaactatt

SEQ ID NO: 1468 - DNA, 225 bp, Unknown
  Encodes 16S rRNA from Pseudoflavonifractor
agagtttgatcatggctcaggacgaacgctggcggcgtgcttaacacatgcaagtcgaacgaggaatgttaaaaagcttgctttttaacatttcgagtggcggacgggtgagtaacgcgtgaggaacctgtcttctacagggggataacgtcccgaaagggacgctaataccgcataagaccacggtgccgcatggcacaggggtcaaaggaggaatccggtaga

SEQ ID NO: 1469 - DNA, 225 bp, Unknown
  Encodes 16S rRNA from Calditerricola
agagtttgatcatggctcagaatgaacgctggcggcatggattaggcatgcaagtcgaacgggatccctcgggatctagtggcgaaagggtgagtaacacgtgagcaacctgcccccaaggccggaataagcactggaaacggtgtctaaaaccggatgaggcctctgtccacatggacagtcagccaaatattcataccctggggatgggctcgcggcccatta

SEQ ID NO: 1470 - DNA, 225 bp, Unknown
  Encodes 16S rRNA from Clostridium IV
agagtttgatcatggctcaggacgaacgctggcggcgtgcctaacacatgcaagtcgagcggagacatacgacggagaggaagttttcggatggaatcaaagatgtatgttttagcggcggacgggtgagtaacgcgtgagcaacctgtccctcacagggggataacacaccgaaaggtgtactaataccgcatgacactgacttgagacatcttgagacagtca

SEQ ID NO: 1471 - DNA, 225 bp, Unknown
  Encodes 16S rRNA from Clostridium IV
agagtttgatcctggctcaggacgaacgctggcggcgtgcttaacacatgcaagtcgaacgagaatctgtggaaggagttttcggacaacggaaacagaggaaagtggcggacgggtgagtaacgcgtgaggaacctgccttggagagggggacaacagctggaaacggctgctaataccgcatgatgcacgatggggacatccctgacgtgccaaagatttatc

SEQ ID NO: 1472 - DNA, 225 bp, Unknown
  Encodes 16S rRNA from Adlercreutzia
agagtttgatcatggctcaggatgaacgctggcggcgtgcttaacacatgcaagtcgaacggttaaaccggcttcggccggacatagagtggcgaacgggtgagtaacacgtgaccaacctgccccgcgcaccgggacagcctcgcgaaagcgggattaataccggatactccggcggcgcgggatggggtcgcggcccatcaggtagtaggtcgggtaggggcc

SEQ ID NO: 1473 - DNA, 225 bp, Unknown
  Encodes 16S rRNA from Bulleidia
agagtttgatcatggctcaggatgaacgctggcggcgtgcctaatacatgcaagtcgaacgagagcgaccagcttgctggtcaatcgagtggcgaacgggtgagtaacacataaacaatctgccctgaagactgggataacgtagggaaacccacgctaataccggataggcagtgagggggcatcctcttactgttaaagctgggctacagcactgcaggatga

SEQ ID NO: 1474 - DNA, 225 bp, Unknown
  Encodes 16S rRNA from Lachnospiracea incertae sedis
agagtttgatcctggctcaggatgaacgctggcggcgtgcctaacacatgcaagtcgagcggagtaagacaccgaatgaggatccgtctgatttcaccgtcttacttagcggcggatgggtgagtaacgcgtggacaacctgcccttcactgggggataacaaccggaaacgggtgctaataccgcatgggcgcgaacgaccgcatgatcgatcgcgtaaagatt

SEQ ID NO: 1475 - DNA, 225 bp, Unknown
  Encodes 16S rRNA from Mucilaginibacter
agagtttgatcatggctcaggatgaacgctggcggcaggcctaatacatgcaagtcggacggcagcatgccgtagcaatacggtgatggcgagtggcgtacgggtgcgtaacacgtgtgcaacctgccccgcacagggacaaaacgccgggaaactggcgctaatatcccatgacgccgcgctggggcatccctttgcggctaaagaggcgactcggtgcgggat

SEQ ID NO: 1476 - DNA, 225 bp, Unknown
  Encodes 16S rRNA from Victivallis
agagtttgatcctggctcagaacgaacgctggcggcatggattaggcatgcaagtcgaacggaagcagcaatgcttcagtggcggaagggtgaggaacgcgtgagtaatctgccctcaagttgggaataacagttggaaacgactgctaataccgaatgtggctgtaatttcgcatgaagttatggttaaagatttattgcttgaggatgagctcgcgtcccatt

SEQ ID NO: 1477 - DNA, 225 bp, Unknown
  Encodes 16S rRNA from Anaerovorax
agagtttgatcatggctcaggatgaacgctggcggcgtgcctaacacatgcaagtcgagcgggaaatcgctgattgagatttcggttgattgaagcgatggatagcggcggacgggtgagtaacgcgtaggtaatctgccttcagcacagggatagcctagggaaacctggattaatacctgataacgcattgaagtcacatggctttgatgccaaagatttatc

SEQ ID NO: 1478 - DNA, 225 bp, Unknown
  Encodes 16S rRNA from Clostridium XlVb
agagtttgatcctggctcaggatgaacgctggcggcgtgcttaacacatgcaagtcgagcgaagtttattgagcttgcttaataaacttagcggcggacgggtgagtaacgcgtgggtaacctgccctgtacagaggaataacagttagaaatgactgctaatgcctcataagccgacggaatggcatctttcagtcggaaaagatttatcggtacaggagggac

SEQ ID NO: 1479 - DNA, 225 bp, Unknown
  Encodes 16S rRNA from Clostridium XlVa
agagtttgatcatggctcaggatgaacgctggcggcgcatttaagacatgcaagtcgaacgaaaaaatttaatctaaacggaattgaagaattatctgataagaagttttaaccgaattttttagtggcggacgggtgagtaatacatagataatctgccttttagagggaaataactactggaaacggtagataatgtcccataagaccacactaccgcatgat

SEQ ID NO: 1480 - DNA, 225 bp, Unknown
  Encodes 16S rRNA from Prevotella
agagtttgatcctggctcaggatgaacgctagcggcaggcttaacacatgcaagtcgaggggcagcgggctgtagcaatacggtgccggcgaccggcggacgggtgcgtaacgcgtatgcaacctgcccggcacaggggaatagcccggcgaaagccggagtaatgccccatggttccagcatcccgcatggggagctggataaacccgcgagggggtgccggat

SEQ ID NO: 1481 - DNA, 225 bp, Unknown
  Encodes 16S rRNA from Bacteroides
agagtttgatcatggctcaggatgaacgctagcgacaggcctaacacatgcaagtcgaggggcagcacgaaggaagcttgctttctttggtggcgaccggcgcacgggtgcgtaacgcgtatgcaacctgtccataaccgagggatagcctcccgaaagggagattaaaacttcatgtgccacatgagggcatccgagagtggtgaaacgttacgggttatggtt

SEQ ID NO: 1482 - DNA, 225 bp, Unknown
  Encodes 16S rRNA from Schwartzia
agagtttgatcctggctcaggacgaacgctggcggcgtgcttaacacatgcaagtcgaacggggcgatttgaaagcttgcttttgatgagcctagtggcaaacgggtgagtaacgcgtaggcaacctgccctcaggatggggacaacggcccgaaaggaccgctaataccgaatgacgtatctttttcgcatggaagagataccaaaggcggagcaatccgtcac

SEQ ID NO: 1483 - DNA, 225 bp, Unknown
  Encodes 16S rRNA from Pyramidobacter
agatttgatcctggctcaggatgaacgctggcggcgtgcttaacacatgcaagttgcgcggggatctgatgatgagacttcggtggatttgttagatcctagcggcggacgggtgagtaaagcacaaggacgtgtccgagcgagggggacaactgcgggaaaccgtagctaataccccgtaagccgagaggtgaaagcagcaatgcgcgagcggagcgacttgtg

SEQ ID NO: 1484 - DNA, 225 bp, Unknown
  Encodes 16S rRNA from Eubacterium
agagtttgatcctggctcaggacgaacgctggcggcgtgcctaacacatgcaagtcgaacgaagcttgatttcagatttcttcggaaagacgaatgatatgactgagtggcggacgggtgagtaacgcgtgagcaacctgccctttggatcgggatagcgtttggaaacgaacggtaataccgaataaagtatttggatggcatcatctgaataccaaagctccg

SEQ ID NO: 1485 - DNA, 225 bp, Unknown
  Encodes 16S rRNA from Lachnospiracea incertae sedis
agagtttgatcatggctcaggatgaacgctggcggcgtgcctaacacatgcaagtcgaacgaagacatgcggacggaatcctccgggaggaaggctgcatggactgagtggcggacgggtgagtaacgcgtgggtaacctgccctgtacagggggacaacagttggaaacgactgctaataccgcataagcatacaggaccgcatggtccggtatgaaaaactcc

SEQ ID NO: 1486 - DNA, 225 bp, Unknown
  Encodes 16S rRNA from Clostridium XlVa
agagtttgatcatggctcaggatgaacgctggcggcgtgcttaacacatgcaagtcgaacgaggcttaacgaatgagatcttcggatggattttgttaatccgagtggcggacgggtgagtaacgcgtgggtaacctgccttacacagggggacaacagccggaaacggctgctaataccgcataacccgctagggccgcatggcccggacggaaaagatttatc

SEQ ID NO: 1487 - DNA, 225 bp, Unknown
  Encodes 16S rRNA from Roseburia
agagtttgatcctggctcaggatgaacgctggcggcgtgcttaacacatgcaagtcgaacgaagcacatggacggaattccttcggggaggaagaccatgtgactgagtggcggacgggtgagtaacgcgtgggtaacctacctcatacagggggataacagctggaaacggctgttaataccgcataagcgcacagggccgcatggtccggtgtgaaaaactcc

SEQ ID NO: 1488 - DNA, 225 bp, Unknown
  Encodes 16S rRNA from Clostridium XlVb
agagtttgatcatggctcaggatgaacgctggcggcgtgcttaacacatgcaagtcgaacgagagaagacgaaaagcttgctttttgtcctatcgagtggcggacgggtgagtaacgcgtgagtaacctgccccatactggggaataacgtttggaaacggacgctaataccgcataagcaggcggagggacatccctcagtttgaaaagatttatcggtatggg

SEQ ID NO: 1489 - DNA, 225 bp, Unknown
  Encodes 16S rRNA from Enterorhabdus
agagtttgatcctggctcaggatgaacgctggcggcgtgcctaacacatgcaagtcgaacggttaaaccgccctcgggcggacatagagtggcgaacgggtgagtaacacgtgaccaacctgccccgcgcaccgggacaaccgctggaaacggcggctaataccgggtactccggagggggcgcatgcccccgccgggagagctccggcggcgcgggatggggtc

SEQ ID NO: 1490 - DNA, 225 bp, Unknown
  Encodes 16S rRNA from Pedobacter
agagtttgatcctggctcaggatgaacgctagcggcaggcctaatacatgcaagtcgaacggtaaatgtcccttcggggacatgagagtggcggacgggtgcgtaacgcgtatgcaaccaacccccctcaccgggatagccggtggaaacgccggataagaccggatgcgcccatggggaggcatctccctgcgggcaaggcggcgacgcggagggggacgggca

SEQ ID NO: 1491 - DNA, 225 bp, Unknown
  Encodes 16S rRNA from Clostridium sensu stricto
agagtttgatcatggctcaggacgaacgctggcggcgtgcttaacacatgcaagtcgaacgagacttaagagcggaagtcttcggatggaaggtcataagtcgagtggcggacgggtgagtaacgcgtgagcaacctgtcttatacagggggataacactccgaaaggagcgctaataccgcataagaccacgatgccgcatggtatcggggtaaaaggagcgat

SEQ ID NO: 1492 - DNA, 225 bp, Unknown
  Encodes 16S rRNA from Clostridium XlVa
agagtttgatcatggctcaggatgaacgctggcggcgtgcttaacacatgcaagtcgaacggacttaggccaccgaactgaatttagcttgctattgaaggttcaccggtctaagttagtggcggacgggtgagtaacgcgtgggcaacctgcctttatccgggggataacagttagaaatgactgctaataccgcataagcgcacgaggaggcatctccttgtg

SEQ ID NO: 1493 - DNA, 225 bp, Unknown
  Encodes 16S rRNA from Clostridium III
agagtttgatcatggctcaggacgaacgctggcggcgcgcctaacacatgcaagtcgaacgggactagtgaccggagaatagatgaggttatctattttgcgatcactagttcagtggcggacgggtgagtaaagcatgagcaacctggctactagagggggatagcttttggaaacagaagataataccgcatacatcaaagatttcgcatgagatttttggaa

SEQ ID NO: 1494 - DNA, 225 bp, Unknown
  Encodes 16S rRNA from Desulfotomaculum
agagtttgatcatggctcaggacgaacgctggcggcgtgcttaatacatgcaagtcgaacggaagtaaagatttcggtttttactttagtggcgaacgggtgagtaacgcgtgaacaacctgactcgaagagggggataacaacgggaaactgttgctaataccgcataagaccacagaaccgcatgattcaggggtcaaagatttatcgctttgagaggggttc

SEQ ID NO: 1495 - DNA, 225 bp, Unknown
  Encodes 16S rRNA from Clostridium IV
agagtttgatcctggctcaggacgaacgctggcggcgtgcctaacacatgcaagtcgaacggaagcgtacattagaagttttcggatggaagatatacgttttagtggcggacgggtgagtaacgcgtgagtaacctgcctttcagagggggataacgttttgaaaagaacgctaataccgcataacgtaaaggagtcgcatggcttcattaccaaaggagcaat

SEQ ID NO: 1496 - DNA, 225 bp, Unknown
  Encodes 16S rRNA from Proteiniclasticum
agagtttgatcatggctcaggacgaacgctggcggcgtgcttaacacatgcaagtcgaacgagggatgggggagagcttgctctttttcattccgagtggcggacgggtgagtaacgcgtgaggaacctgtctttcacagggggataacgtaccgaaagggacgctaataccgcataagaccacagcaccgcatggtgaaggggtcaaaggaggaatccggtgga

SEQ ID NO: 1497 - DNA, 225 bp, Unknown
  Encodes 16S rRNA from Prevotella
agagtttgatcatggctcaggatgaacgctagctacaggcttaacacatgcaagtcgaggggcagcatgggagttgcttgcaacttctgatggcgaccggcgcacgggtgagtaacgcgtatccgaccttcccccaggtagggaacagcccggcgaaagtcggattaatgccctatagtctgcgaattgcgcatgttgtttgcagtaaagatttatcgccttggg

SEQ ID NO: 1498 - DNA, 225 bp, Unknown
  Encodes 16S rRNA from Faecalibacterium
agagtttgatcctggctcaggatgaacgctggcggcgtgcataacacattcaagtcgaacggagttgcgatggaaagaggcttcggccaatggaagttgtaacttagtggcggacgggtgagtaacgcgtgagcaacctacctatgcgcgggggacaacagttggaaacgactgctaataccgcataaatcatggtaaaggcatctttatcatggcaaagattaa

SEQ ID NO: 1499 - DNA, 225 bp, Unknown
  Encodes 16S rRNA from Microbacterium
agagtttgatcatggctcaggatgaacgctggcggcgtgcttaacacatgcaagtcgaacgatgaagctggagcttgctctggtggattagtggcgaacgggtgagtaacacgtgagcaacctgcccctgactctgggataacagccggaaacggctgctaataccggatatgcaccatgaacgcatgttctgtggtgggaaagatttttcggttggggatgggc

SEQ ID NO: 1500 - DNA, 225 bp, Unknown
  Encodes 16S rRNA from Leucobacter
agagtttgatcctggctcaggacgaacgctggcggcgtgcttaacacatgcaagtcgaacgatgaagcccagcttgctgggtggaagagtggcgaacgggtgagtaacacgtgagtaacctgcccttgactctgggataagcgctggaaacggcgtctaatactggatacgacctatcaccgcatggtgtgtgggtggaaagatttatcggttttggatggactc

SEQ ID NO: 1501 - DNA, 225 bp, Unknown
  Encodes 16S rRNA from Prevotella
agagtttgatcctggctcaggatgaacgctagctacaggcttaacacatgcaagtcgaggggtaacatgattggagcttgctctgattgatgacgaccggcgcacgggtgcgtaacgcgtatccaaccttccccctaccagggaatagcccgttgaaagacggattaatgccctatgttgtgtgataatggcatcagagttacacgaaagactttgtcggtatgg

SEQ ID NO: 1502 - DNA, 225 bp, Unknown
  Encodes 16S rRNA from Sphingobacterium
agagtttgatcatggctcaggatgaacgctagcggcaggcctaatacatgcaagtcgaacgggatccagatcaaagcttgctttggtttggtgagagtggcgcacgggtgcgtaacgcgtgagcaacctacccttgtcagggggatagcccggcgaaagtcggattaataccgcatgacatcattgagaggcatctttctatgatcaaagatttatcggacaagg

SEQ ID NO: 1503 - DNA, 225 bp, Unknown
  Encodes 16S rRNA from Fusibacter
agagtttgatcctggctcaggattaacgctggcggcgtgcctaacacatgcaagtcgagcgggaaatttgagagtgaagcttcggcggaacttttaaatggagagcggcggacgggtgagtaacgcgtaggtaacctgccctgcacagagggatagccactggaaacggtgattaatacctcataaaactgttttgccgcatgacaaaacagccaaagatttatc

SEQ ID NO: 1504 - DNA, 225 bp, Unknown
  Encodes 16S rRNA from Howardella
agagtttgatcctggctcaggataaacgctggcggcgcacataagacatgcaagtcgaacggaagtcgttattttagaagtggaaagaagatttatctgatagaagcagaagaaataacaatggctttagtggcggactggtgagtaacacgtaagcaacctggctattagaggggaataacagtgagaaatcattgctaataccgcataagcttgtaataccgc

SEQ ID NO: 1505 - DNA, 225 bp, Unknown
  Encodes 16S rRNA from Pedobacter
agagtttgatcatggctcaggatgaacgctagcggcaggcctaatacatgcaagtcgaacggtaaagtccccttcgggggattgagagtggcggacgggtgcgtaacgcgtatgcaaccaacccccctcaccgggatagccggtggaaacgccggataagaccggatgcgcccatggggaggcatctccctgcgggcaaggcggcgacgcggagggggacgggca

SEQ ID NO: 1506 - DNA, 225 bp, Unknown
  Encodes 16S rRNA from Caldilinea
agagtttgatcatggctcaggatgaacgctggcggcgtgcttaacacatgcaagtcgaacgtgagagatagcaatatcttgaaagtggcaaacgggtgagtaacacgtagataacctgcctcggagtgggggataaccacgggaaactgtggctaataccgcatagtcttgcggacacgggagtgtcggcaagtaaagctttagtgcttcgagaggggtctgcgt

SEQ ID NO: 1507 - DNA, 225 bp, Unknown
  Encodes 16S rRNA from Turicibacter
agagtttgatcctggctcaggatgaacgctggcggcgtgcctaatacatgcaagtcgaacggagcacttcggtgcttagtggcgaacgggtgagtaacacataaacaatctaccctgaagactgggataacggttggaaacgaccgctaataccggataggtaactctgaggcatcttagagttattaaagttgggttacaacactgcaggatgagtttatgtcg

SEQ ID NO: 1508 - DNA, 225 bp, Unknown
  Encodes 16S rRNA from Clostridium IV
agagtttgatcctggctcaggacgaacgctggcggcgtgcttaacacatgcaagtcgaacggtcttcttacgggtagcaatacttgtttgaagatagtggcggacgggtgagtaacgcgtgagcaacctgcccatcagaggggaatagcgtctggaaacggacgataataccgcataaaactgagtcaccgcatgatgacacagccaaaggagaaatccgctgat

SEQ ID NO: 1509 - DNA, 225 bp, Unknown
  Encodes 16S rRNA from Alistipes
agagtttgatcatggctcaggatgaacgctagcggcaggcctaacacatgcaagtcgaggggcagcgcggtgtagcaatacactggcggcgaccggcgcacgggtgcgtaacgcgtatgcaacccacccgcgacaggggcataacggggggaaacccccactaattccccgtaaggccgcgtccccgcatggggatgcggcgaaagccttcgggcggttgcggac

SEQ ID NO: 1510 - DNA, 225 bp, Unknown
  Encodes 16S rRNA from Clostridium XlVa
agagtttgatcatggctcaggatgaacgctggcggcgtgcttaatacatgcaagtcgaacggaagatacccagagcttgctcttgatatctttagtggcggacgggtgagtaacgcgtgggtaacctgcctcatacagggggataacagttagaaatgactgctaaaaccgcataacattgcagtgccgcatgatactgcgatcaaatatttataggtatgagat

SEQ ID NO: 1511 - DNA, 225 bp, Unknown
  Encodes 16S rRNA from Clostridium XlVa
agagtttgatcatggctcaggatgaacgctggcggcgtgcttaacacatgcaagtcgaacggagcttattaagaaagcggagcttgctccaatggatttttaagcttagtggcggacgggtgagtaacgcgtgggtaacctgccttgcacagggggacaacagttggaaacgactgctaataccgcataagccggtagcttcgcatgaagcatccggaaaagatt

SEQ ID NO: 1512 - DNA, 225 bp, Unknown
  Encodes 16S rRNA from Prevotella
agagtttgatcatggctcaggatgaacgctagctacaggcttaacacatgcaagtcgaggggaaacggaaggcggagcttgctttgcctagacgtcgaccggcggatgggtgcgtaacgcgtatccaacctgcccgtgtcccggggatagcccatggaaacgtggattaacacccgatggtcctgcgcttccgcatggcggcgcaggtaaacgtgagggacatgg

SEQ ID NO: 1513 - DNA, 225 bp, Unknown
  Encodes 16S rRNA from Clostridium XlVa
agagtttgatcctggctcaggatgaacgctggcggcgtgcctaacacatgcaagtcgaacgagggtcctaaacctgagattcgtcgaaggggagggaattccgagtggcggatgggtgagtaacgcgtggagaacctgccctttgctgggggataacaactggaaacggttgacaataccgcataagctcggttggccgcatgaccgaccgaggaaagatttatc

SEQ ID NO: 1514 - DNA, 225 bp, Unknown
  Encodes 16S rRNA from Butyricimonas
agagtttgatcctggctcaggatgaacgctagcgacaggcttaacacatgcaagtcgaggggcagcatgggggtggcaacacctctgatggcgaccggcgcactggtgagtaacacgtatgcgacctgccccgttccggggtatagaccagggaaacttggcgtaatcccccatgtgccctggggctgcatggccccatggtgaaaggttcgccgggacgggatg

SEQ ID NO: 1515 - DNA, 225 bp, Unknown
  Encodes 16S rRNA from Anaerovibrio
agagtttgatcctggctcaggacgaacgctggcggcgtgcttaacacatgcaagtcgaacggggcgaagaggagcttgctcttcctagcctagtggcaaacgggtgagtaacgcgtaggcaacctgcccttcagatggggacaacatttcgaaaggaatgctaataccgaatgatgtacattggtcgcatgactgatgcaccaaaggccgggcaaccggtcactg

SEQ ID NO: 1516 - DNA, 225 bp, Unknown
  Encodes 16S rRNA from Prevotella
agagtttgatcatggctcaggatgaacgctagctacaggcttaacacatgcaagtcgaggggcagcatgtcgtgtgcttgcacacgatgatggcgaccggcgcacgggtgagtaacgcgtatccaacctgcccatgactccgggatagcccgctgaaaagcggattaacaccggatgcggtcgaaagaggacatctgatttcgaccaaagcttcggcggtcatgg

SEQ ID NO: 1517 - DNA, 225 bp, Unknown
  Encodes 16S rRNA from Pseudoflavonifractor
agagtttgatcatggctcaggatgaacgctggcggcgtgcataacacattcaagtcgaacggactgattcgatagcttgctattgatgaaagttagtggcggacgggtgagtaacgcgtgagcaacctgcccctatgtgcgggataacgtctggaaacggacgctaataccgcataaaccaatcggaccgcatgatctggttggcaaagatttattgcataggga

SEQ ID NO: 1518 - DNA, 225 bp, Unknown
  Encodes 16S rRNA from Corynebacterium
agagtttgatcatggctcaggacgaacgctggcggcgtgcttaacacatgcaagtcgaacggaaaggcccagcttgctgggtgctcgagtggcgaacgggtgagtaacacgtgggtgatctgcccctaacttcgggataagcttgggaaactgggtctaataccggataggacaatcgtttagtgtcggttgtggaaagttttttcggttagggatgagcccgcg

SEQ ID NO: 1519 - DNA, 225 bp, Unknown
  Encodes 16S rRNA from Leucobacter
agagtttgatcatggctcaggacgaacgctggcggcgtgcttaacacatgcaagtcgaacgatgaagcctagcttgctgggtggaagagtggcgaacgggtgagtaacacgtgagtaacctgccccgaactctgggataagcgctggaaacggcgtctaatactggatatgcaccatggaggcatcttctgtggtgggaaagatttatcggttcgggatgggctc

SEQ ID NO: 1520 - DNA, 225 bp, Unknown
  Encodes 16S rRNA from Kerstersia
agagtttgatcctggctcagattgaacgctagcgggatgctttacacatgcaagtcgaacggcagcacgaggagcttgctccttggtggcgagtggcgaacgggtgagtaatatatcggaacatgcccagtagcgggggataactactcgaaagagtggctaataccgcatacgtcctacgggagaaagcaggggaccttcgggccttgcactattggagtggcc

SEQ ID NO: 1521 - DNA, 225 bp, Unknown
  Encodes 16S rRNA from Slackia
agagtttgatcctggctcaggatgaacgccggcggcgcgcctaacacatgcaagtcgagcggaggacctgtcttcggacaggcgatcagcggcgaacgggtgagtaacgcgtgggcaacctgccccccgcacgggaatagccccgggaaaccgggggtaatgcccgacggcccggcagaggggcatccctctgccggcgaagccatcgcggcgggggatgggccc

SEQ ID NO: 1522 - DNA, 225 bp, Unknown
  Encodes 16S rRNA from Lactococcus
agagtttgatcatggctcaggacgaacgctggcggcgtgcctaatacatgcaagttgagcgctgaaggttggtacttgtaccgactggatgagcagcgaacgggtgagtaacgcgtggggaatctgcctttgagcgggggacaacatttggaaacgaatgctaataccgcataaaaactttaaacacaagttttaagtttgaaagatgcaattgcatcactcaaa

SEQ ID NO: 1523 - DNA, 225 bp, Unknown
  Encodes 16S rRNA from Prevotella
agagtttgatcatggctcaggatgaacactagctacaggcttaacacatgcaagtcgaggggtaacatgattggagcttgctccgattgatgacgaccggcgcacgggtgcgtaacgcgtatccaaccttccccctaccagggaatagcccgttgaaagacggattaatgccctatgttgtgtgataatggcatcagagttacacgaaagactttgtcggtatgg

SEQ ID NO: 1524 - DNA, 225 bp, Unknown
  Encodes 16S rRNA from Clostridium IV
agagtttgatcctggctcaggacgaacgctggcggcgcgcctaacacatgcaagtcgaacggagagtgggttttgattctttcgggatgatgaattcatttcttagtggcggacgggtgagtaacacgtgagcaacctgccttgcagagcgggataacggttggaaacgatcgctaataccgcataacatatgattgtcgcatggctatcatatcaaagatttat

SEQ ID NO: 1525 - DNA, 225 bp, Unknown
  Encodes 16S rRNA from Prevotella
agagtttgatcctggctcaggatgaacgctagctacaggcttaacacatgcaagtcgaggggaaacggaagggaaagcttgctttccctagacgtcgaccggcggatgggtgcgtaacgcgtatccaacctgcccgtgtcccggggatagcccatggaaacgtggattaacacccgatggccctgcgcttccgcatggcggcgcaggtaaacgcgagggacatgg

SEQ ID NO: 1526 - DNA, 225 bp, Unknown
  Encodes 16S rRNA from Bacteroides
agagtttgatcctggctcaggatgaacgctagctacaggcctaacacatgcaagtcgcggggcagcattgaggtagcaatacctcagatggcgaccggcgcacgggtgcgtaacgcgtatccaacctggcccttactcgggtatagccctgcgaaagtaggattaatccccgatgttgtcaagatggagccttttttcttgaccaaagatttatcggtaagggat

SEQ ID NO: 1527 - DNA, 225 bp, Unknown
  Encodes 16S rRNA from Lactobacillus
agagtttgatcatggctcaggacgaacgctggcggcgtgcctaatacatgcaagtcgaacgaactctggtattgattggtgcttgcatcatgatttacatttgagtgagtggcgaactggtgagtaacacgtgggaaacctgcccagaagcgggggataacacctggaaacagatgctaataccgcataacaacttggaccgcatggtccgagtttgaaagatgg

SEQ ID NO: 1528 - DNA, 225 bp, Unknown
  Encodes 16S rRNA from Prevotella
agagtttgatcatggctcaggatgaacgctagctacaggcttaacacatgcaagtcgaggggcagcatgattctagcttgctagaattgatggcgaccggcgcacgggtgcgtaacgcgtatccaaccttcccgcgagtcaggcacagcccggcgaaagtcggattaattcctgatgttctcctttgacggcatcagagaaggagtaaagaatttttcgcttgcg

SEQ ID NO: 1529 - DNA, 225 bp, Unknown
  Encodes 16S rRNA from Clostridium XlVa
agagtttgatcctggctcaggatgaacgctggcggcgtgcctaacacatgcaagtcgaacggagtttatgaagttttcggactgagtaaacttagtggcggacgggtgagtaacgcgtgggtaacctgcctcatacagggggataacagttggaaacggctgctaaaaccgcataagcatacattgtcgcatgacagagtgtgaaaatatttataggtatgagat

SEQ ID NO: 1530 - DNA, 225 bp, Unknown
  Encodes 16S rRNA from Clostridium sensu stricto
agagtttgatcctggctcaggacgaacgctggcggcgtgcttaacacatgcaagtcgagcgaggatctcaccggaaggccttcgggccggaaggtaagattcgagcggcggacgggtgagtaacgcgtgagcgatctgtcccgcacagggggataacacttggaaacaggtgctaataccgcataagaccacgaggccgcatggccatggggtaaaaggagcgat

SEQ ID NO: 1531 - DNA, 225 bp, Unknown
  Encodes 16S rRNA from Syntrophococcus
agatttgatcctggctcaggatgaacgctggcggcgtgcctaacacatgcaagtcgagcggagtatgacgagtgcttgcacatgtcatacttagcggcggatgggtgaggaacgcgtggagaacctgcccctcacagggggataacagttggaaacgactgttaataccgcatatgctcacggtgccgcatggcacagggaggaaagatttcatcggtgagagat

SEQ ID NO: 1532 - DNA, 225 bp, Unknown
  Encodes 16S rRNA from Clostridium XlVa
agagtttgatcctggctcaggatgaacgctggcggcgtgcctaacacatgcaagtcgaacggaaattgctgattgaagctttcgggtggatttcagtaattttagtggcggacgggtgagtaacacgtgggtaacctgccctgtaccgggggataacagttggaaacggctgttaataccgcataagcgcacagcttcgcatgaagcagtgtgaaaaactccggt

SEQ ID NO: 1533 - DNA, 225 bp, Unknown
  Encodes 16S rRNA from Victivallis
agagtttgatcatggctcagaatgaacgctggcggcatggattaggcatgcaagtcgaacgagaaagcggcttcggccgcgagtaaagtggcgaaagggtgagtagcacgtggggaacctgccccggggaccggaacaagcctgtgaaaacgggtctgagaccggatgtcgccccggcccgcatgggccggaggcgaaagattaatcgccccgggatggccccgc

SEQ ID NO: 1534 - DNA, 225 bp, Unknown
  Encodes 16S rRNA from Bacteroides
agagtttgatcctggctcaggatgaacgctagctacaggcctaacacatgcaagtcgcggggcagcatgggcgtagcaatacgcctgatggcgaccggcgcacgggtgcgtaacgcgtatccaacctggcccttactcgggtatagccctgcgaaagtaggattaatccccgatgttgtcaagcgatagccttttcacttgaccaaagagtttttcggtaaggga

SEQ ID NO: 1535 - DNA, 225 bp, Unknown
  Encodes 16S rRNA from unknown taxa
agagtttgatcctggctcaggatcaacgctggcggcgtgcctaatgcatgcaagtcgagcggggtgtccttcggggcgcttacgcggcggacgggtgcggaacacgtgggcaacctgccctgaggtgggggatagccggtggaaacaccgggtaattccgcatacggtcacggaccggggggtctgtgaggaaaggctcgtaagagtcgccttgggaggggcctg

SEQ ID NO: 1536 - DNA, 225 bp, Unknown
  Encodes 16S rRNA from Clostridium XlVa
agagtttgatcctggctcaggatgaacgctggcggcgtgcctaacacatgcaagtcgaacgaagcatgctggaaagagaccttcggggaaccggaaatcatgacttagtggcggacgggtgagtaacgcgtgggcaacctgccgtacacagggggacaacagctggaaacggctgctaataccgcataagcgcacagcttcgcatggagcggtgtgaaaagcatt

SEQ ID NO: 1537 - DNA, 225 bp, Unknown
  Encodes 16S rRNA from Prevotella
agagtttgatcatggctcaggatgaacgctagctacaggcttaacacatgcaagtcgaggggcagcatggcggtagcaataccgccgatggcgaccggcgcacgggtgagtaacgcgtatccaaccttccccctggtagggcatagcccggcgaaagtcggattaataccctatgttttcctttgacggcatccgacgaggaacaaagatttatcgcccggggat

SEQ ID NO: 1538 - DNA, 225 bp, Unknown
  Encodes 16S rRNA from unknown taxa
agagtttgatcctggctcagaacgaacgctggtagcgtggattaggcatgcaagtcgaacgggatcagccggttagcaataattggctgtgagagtggcggattggggaggaacacgtgagcaacctgcccttgagttggggaaaaccgttggaaacgacggctaataccggatgtggcgcccggagacatcttcggagcgctaaagggggccgcaaggctcccg

SEQ ID NO: 1539 - DNA, 225 bp, Unknown
  Encodes 16S rRNA from Clostridium XlVa
agagtttgatcatggctcaggatgaacgctggcggcgtgcctaacacatgcaagtcgaacgaagaccccgaagcggaaatttcggttgaagtggagggaggactgagtggcggacgggtgagtaacgcgtggataacctgccccatacagggggatagcagttggaaacgactgataataccgcatgagcgcacgtggagacatctccatgtgtgaaaagaaata

SEQ ID NO: 1540 - DNA, 225 bp, Unknown
  Encodes 16S rRNA from Treponema
agagtttgatcatggctcagaacgaacgctggcggcgcgtcttaagcatgcaagtcgagcgggaatagaggtgcttgcacttctatgagagcggcggactggtgagtaacacgtaggcaacgtacccttcggacggggatagccggcagaaatgtcgggtaataccggatgtgaacttacttcgtgaaggagtaagtggaaaggagcttcggctccgccggagga

SEQ ID NO: 1541 - DNA, 225 bp, Unknown
  Encodes 16S rRNA from Pyramidobacter
agagtttgatcctggctcaggatgaacgctggcggcgtgcttaacacatgcaagttgcgcggggatctgacgatgagacttcggtggatttgttagatcctagcggcggacgggtgagtaaagcacaaggacgtgtccgagcgaggggggcaactgcgggaaaccgtagctaataccccgtaagccgagaggtgaaagcagcaatgcgcgagcggagcgacttgt

SEQ ID NO: 1542 - DNA, 225 bp, Unknown
  Encodes 16S rRNA from Robinsoniella
agagtttgatcctggctcaggatgaacgctggcggcgtgcctaacacatgcaagtcgaacggggtgtcaatcttcggaaagacacttagtggcggacgggtgagtaacgcgtgggtaacctgcctcatacagggggatagcagttggaaacgactgataataccgcataagcgcacagcatcgcatgatgcagtgtgaaaaactccggtggtatgagatggaccc

SEQ ID NO: 1543 - DNA, 225 bp, Unknown
  Encodes 16S rRNA from Lachnospiracea incertae sedis
agagtttgatcatggctcaggatgaacgctggcggcgtgcttaacacatgcaagtcgagcgaagcactctggaagattccttcgggatgattccttagtgacttagcggcggacgggtgagtaacgcgtgggcaacctgccttgtacagggggataacagttagaaatgactgctaataccgcataagcacacagcatggcatcatgcagtgtgaaaaactccgg

SEQ ID NO: 1544 - DNA, 225 bp, Unknown
  Encodes 16S rRNA from Clostridium XI
agagtttgatcctggctcaggacgaacgctggcggcgtgcctaacacatgcaagtcgagcgaggatttagcggaaggaagcttcggcagagagaaggtaaatcttagcggcggacgggtgagtaacgcgtgaacaatctgtcccggacagggggataacacatggaaacaggtgctaataccgcataagaccacagcgtcgcatggcggtggggtaaaaggagaa

SEQ ID NO: 1545 - DNA, 225 bp, Unknown
  Encodes 16S rRNA from Bifidobacterium
agagtttgatcatggctcaggatgaacgctggcggcgtgcttaacacatgcaagtcgaacgggatccctggcagcttgctgccggggtgagagtggcgaacgggtgagtaatgcgtgaccgacctgccccatgcaccggaatagctcctggaaacgggtggtaatgccggatgttccacatgagcgcatgcgagtgtgggaaaggctttttgcggcatgggatgg

SEQ ID NO: 1546 - DNA, 225 bp, Unknown
  Encodes 16S rRNA from Bacteroides
agagtttgatcctggctcaggatgaacgctagctacaggcttaacacatgcaagtcgaggggcagcggggagtggcaacactctgccggcgaccggcgcacgggtgagtaacacgtatccaacctgccctgagcttggggatagccctctgaaaggaggattaatacccgatgtggttgtttggcgacatcgcctttcaattaaagatttatcggctcatgatgg

SEQ ID NO: 1547 - DNA, 225 bp, Unknown
  Encodes 16S rRNA from Gordonibacter
agagtttgatcatggctcaggatgaacgctggcggcgtgcttaacacatgcaagtcgaacgattaaaccggctccggccggaaatagagtggcgaacgggtgagtaacacgtgaccaacctgccccgcgcaccgggacagcctcgcgaaagcgggattaataccggatactccggcggcgcgggatggggtcgcggcccatcaggtagtgggtcgggtagaggcc

SEQ ID NO: 1548 - DNA, 225 bp, Unknown
  Encodes 16S rRNA from Enterorhabdus
agagtttgatcatggctcaggatgaacgctggcggcgtgcctaacacatgcaagtcgaacggttaagccggcttcggccgggaataaagtggcgaacgggtgagtaacacgtgaccaacctgccccgcgcaccgggacagccccccgaaagggggattaataccggatactccgcggcccccgcatgggggccgcgggaaagctccggcggcgcgggatggggtc

SEQ ID NO: 1549 - DNA, 225 bp, Unknown
  Encodes 16S rRNA from Lactobacillus
agagtttgatcctggctcaggacgaacgctggcggcgtgcctaatacatgcaagtcgaacgagtttgcttttaatgaaggcggtgcttgcaccaactgatttaaaaataaacgagtggcggacgggtgagtaacacgtgggtaacctaccctaaagtgggggataacatttggaaacagatgctaataccgcataatattaaaaaccacatggtttttaattgaa

SEQ ID NO: 1550 - DNA, 225 bp, Unknown
  Encodes 16S rRNA from Bacteroides
agagtttgatcatggctcaggatgaacgctagctacaggcttaacacatgcaagtcgaggggcagcataggggaggtttcggccacccccgatggcgaccggcggatgggtgagtaacgcgtatccaacctgcccctgtcccggggacagcccttagaaatgaggattaacccccgatggcgcggagaggccgcatggcttttccgccaaatgcgaaggacaggg

SEQ ID NO: 1551 - DNA, 225 bp, Unknown
  Encodes 16S rRNA from Prevotella
agagtttgatcatggctcaggatgaacgctagctacaggcttaacacatgcaagtcgaggggcatcaggacggtagcttgctatcgttgctggcgaccggcgcacgggtgcgtaacacgtatcgaacctacctgccgctcggggatagccctctgaaaggaggattaatacccgatggtttccaatggggacatccccgttggaataaagattcattggcggcgg

SEQ ID NO: 1552 - DNA, 225 bp, Unknown
  Encodes 16S rRNA from Tannerella
agagtttgatcatggctcaggatgaacgctagcgacaggcctaacacatgcaagtcgagggagaagttagaagtagcttgctacggaagatggaaaccggcgcacgggtgcgtaacaggtgtgcaatctgtccatagtcggggaatagcccagcgaaagttggattaaagctccatgtgagtgagaatcgcatgtttttcacttgaaacgtaaggactatgggtg

SEQ ID NO: 1553 - DNA, 225 bp, Unknown
  Encodes 16S rRNA from Bacteroides
agagtttgatcctggctcaggatgaacgctagctacaggcttaacacatgcaagtcgaggggcatcaggggactagcttgctagtcctgctggcgaccggcgcacgggtgagtaacacgtatccaacctgcccccagcttggggatagccctctgaaaggaggattaatacccgatatgcttgttctccggcatcggaggacaatcaaagattcatcggctgtgg

SEQ ID NO: 1554 - DNA, 225 bp, Unknown
  Encodes 16S rRNA from Prevotella
agagtttgatcatggctcaggatgaacgctagcggcaggcttaacacatgcaagtcgaggggcagcgcggagtagcaatactttggcggcgaccggcggaagggtgcgtaacgcgtgagcaacctgcccgtgtccggggcataatcggtggaaacgccgtctaattccccatacgttgctgggcgacatcgcttagtaatgaaaacttattgcggacacggatgg

SEQ ID NO: 1555 - DNA, 225 bp, Unknown
  Encodes 16S rRNA from Clostridium XlVb
agagtttgatcatggctcaggatgaacgctggcggcgtgcctaacacatgcaagtcgaacgagagaggcgaagagcttgctttttgccaatcgagtggcggacgggtgagtaacgcgtgagcaacctgccttacattggggaataacgtttggaaacggacggtaataccgcatatgcagacaagtacggcatcgtacggtttggaaagatttatcgatgtaaga

SEQ ID NO: 1556 - DNA, 225 bp, Unknown
  Encodes 16S rRNA from Gelidibacter
agagtttgatcatggctcaggataaacgctagcggcaggcctaacacatgcaagtcgagcggcagcgggagtggcaacacttgccggcgagcggcggacgggtgagtaacgcgtatgcaacctgcccaccacacggagatagccgaccgaaaggacgattaaactccgatggcattgggactcggcatcgggatccaattaaatatttataggtggtggatgggc

SEQ ID NO: 1557 - DNA, 225 bp, Unknown
  Encodes 16S rRNA from unknown taxa
agagtttgatcatggctcaggatgaacgctggcggcgtgcttcatacatgcaagtcgaacgtgaagctgacttcggtcagtggaaagtggcggacgggtgagtaatacataggaaatctgcccttagctgggggacaacagttggaaacgactgctaataccgcatatgagcttagctgaaatgctaatcttgaaaactacggtggctaaggatgagcctgtgcc

SEQ ID NO: 1558 - DNA, 225 bp, Unknown
  Encodes 16S rRNA from Rhodoplanes
agagtttgatcatggctcagaacgaacgctggcggcaggcttaacacatgcaagtcgaacgccccgcaaggggagtggcagacgggtgagtaacacgtgggaacgtgccttttggttcggaacaacttcgggaaactggagctaataccggataagcccttcgggggaaagatttatcgccaaaagatcggcccgcgtctgattagctagttggtggggtaatgg

SEQ ID NO: 1559 - DNA, 225 bp, Unknown
  Encodes 16S rRNA from Selenomonas
agagtttgatcatggctcaggacgaacgctggcggcgtgcttaacacatgcaagtcgaacgagacggatagaagcttgcttttagaagtcgagtggcaaacgggtgagtaacgcgtagacaacctgcctctgggatggggacaacagcccgaaagggctgctaataccgaatgaaatggtttcttctcctgaagttatcatgaaagatggcctctatttataagc

SEQ ID NO: 1560 - DNA, 225 bp, Unknown
  Encodes 16S rRNA from Escherichia/Shigella
agagtttgatcatggctcagattgaacgctggcggcaggcctaacacatgcaagtcgaacggtaacaggaagcagcttgctgcttcgctgacgagtggcggacgggtgagtaatgtctgggaaactgcctgatggagggggataactactggaaacggtagctaataccgcataatgtcgcaagaccaaagagggggaccttcgggcctcttgccatcggatgtg

SEQ ID NO: 1561 - DNA, 225 bp, Unknown
  Encodes 16S rRNA from Rikenella
agagtttgatcctggctcaggatgaacgctagcggcaggcttaacacatgcaagtcgaggggcagcaggccgggtagcaatacttggtgctggcgaccggcgcacgggtgcgtaacgcgtatgcaacctgcccgtaacaggggtataacggagggaaacttccactaatcccccatattgtcactttttcgcatggggaggtgacgaaagcttaattgtggttac

SEQ ID NO: 1562 - DNA, 225 bp, Unknown
  Encodes 16S rRNA from Coprococcus
agagtttgatcatggctcaggatgaacgctggcggcgtgcttaacacatgcaagtcgaacggaacattccacccgaagattgaagaagcttgcttcggattgattcaaccggaatgtttagtggcggacgggtgagtaacgcgtgggtaacctaccttacacagggggataacagttagaaatgactgctaataccgcataagcgcacggtaccgcatggtacag

SEQ ID NO: 1563 - DNA, 225 bp, Unknown
  Encodes 16S rRNA from Clostridium sensu stricto
agagtttgatcctggctcaggacgaacgctggcggcgcgcctaacacatgcaagtcgaacgggactagtgaccggagcttagaatttctctaggttgcgttcactagttcagtggcggacgggtgagtaaagcatgagtaactttcccattagtggggaatagcttttggaaacagaagataataccgcatacatcgttgaggactcatgttctcttcggaaaag

SEQ ID NO: 1564 - DNA, 225 bp, Unknown
  Encodes 16S rRNA from Hyphomicrobium
agagtttgatcctggctcagaacgaacgctggcggcaggcctaacacatgcaagtcgaacgctgtagcaatacagagtggcagacgggtgagtaacacgtgggaatcttcctatcggtacggaatagctcagggaaacttggggtaataccgcatacgcccttcgggggaaagatttatcgccgatagatgagcccgcgtctgattagctagttggtgaggtaat

SEQ ID NO: 1565 - DNA, 225 bp, Unknown
  Encodes 16S rRNA from Erysipelotrichaceae incertae sedis
agagtttgatcatggctcaggatgaacgctggcggcatgcctaatacatgcaagtcgaacgaagcgacctcaacagaattgtgcttgcacaaggaagatgagattctcgcttagtggcgaacgggtgagtaacacgtaggtaacctgcccatctacctgggacaacagttagaaatgactgctaaaaccggataggtaacattgaggcatctcgatgttattaaa

SEQ ID NO: 1566 - DNA, 225 bp, Unknown
  Encodes 16S rRNA from unknown taxa
agagtttgatcctggctcagaacgaacgctggtagcgtggattaggcatgcaagtcgaacgggatcaccgatatagtaatattgaggtgtgagagtggcggattggggaggaacacgtgagcaacctgccttggagtcggggaaaaccgttggaaacgacggctaataccggatgtggcgcccggtgacatcaccggagcgctaaagggggccgcaaggctctcg

SEQ ID NO: 1567 - DNA, 225 bp, Unknown
  Encodes 16S rRNA from Staphylococcus
agagtttgatcctggctcaggatgaacgctggcggtatgcctaatacatgcaagtcgagcgagagacttcggtctctagcggcgaacgggtgagtaacaagttggtaatctgcctattagttggggatacccaggcgaaagcttggctaataccgtaatacgtaataagctgaaatgcttattataaaaggcgcttcggcgtcgctaatagatgagcctgcttct

SEQ ID NO: 1568 - DNA, 225 bp, Unknown
  Encodes 16S rRNA from unknown taxa
agagtttgatcatggctcagaacgaacgctggtagcgtggattaggcatgcaagtcgaacgggatccatgaagtagcaatacggattggtgagagtggcggaagggcgaggaacacgtgggcaacctgtccaggaggtggggaaaacctcgggaaactgaggctaataccgaatgtggcgcccgcacgcatgtgcggagcgccaaagggggcgaaagctccccct

SEQ ID NO: 1569 - DNA, 225 bp, Unknown
  Encodes 16S rRNA from Victivallis
agagtttgatcctggctcagaacgaacgctggcggcatggattaggcatgcaagtcgaacgaagtagcaatacttagtggcgcaagggtgaggaacacgtgagtgacctgcccgcaagtttggaacagctcctggaaacgggaattaataccggatgtgatcatattgctgcatggtgatatgattaaagcagtaatgcgcttgcggatgggctcgcgtcccatt

SEQ ID NO: 1570 - DNA, 225 bp, Unknown
  Encodes 16S rRNA from Selenomonas
agagtttgatcctggctcaggacgaacgctggcggcgtgcttaacacatgcaagtcgaacgagggaattcttttcggagaatataccgagtggcaaacgggtgagtaacgcgtaggcaacctgccttcaagatggggacaacagtccgaaagggctgctaataccgaatgacatgtctgaaccgcatgggacggacagcaaagacggcctccaaactatgctgtc

SEQ ID NO: 1571 - DNA, 225 bp, Unknown
  Encodes 16S rRNA from Desulfobulbus
agagtttgatcctggctcagaacgaacgctggcggcgtgcttaacacatgcaagtcgaacgcgaaagcggcttcggccgtgagtagagtggcgcacgggtgagtaacgcgtagataacctgtcttcatatccgggataacacgccgaaaggggtactaataccggatatactcgcatttcaataggtgaggcgaggaaaggtggcctctgattcaagctactgta

SEQ ID NO: 1572 - DNA, 225 bp, Unknown
  Encodes 16S rRNA from Clostridium III
agagtttgatcctggctcaggacgaacgctggcggcgtgcctaacacatgcaagtcgagcggagccaattgacggatcccttcggggtgaagacgaggaagcttagcggcggacgggtgagtaacgcgtgagtaacctgcctgtaagagggggataattcctggaaacggggactaataccgcatattgagcacatatcgcatggtatatgcttgaaagatttat

SEQ ID NO: 1573 - DNA, 225 bp, Unknown
  Encodes 16S rRNA from Spirochaeta
agagtttgatcatggctcagaacgaacgctggcggtgcgttttaagcatgcaagttgagcggcagtagtagcaatactatgagagcggcggacgggtgagtaacacgtggataatctaccttgaagtttggaatataccgtggaaacacggagtaataccggataagacggtacttggggacaagtattgggaaaggtgctacggcatcgctttaagatgagtcc

SEQ ID NO: 1574 - DNA, 225 bp, Unknown
  Encodes 16S rRNA from Kordia
agagtttgatcctggctcaggataaacgctagcggcaggcctaacacatgcaagtcgagcggtaacacggtgtagcaatacattggtgacgagcggcggacgggtgagtaacgcgtatgcaacctacccactacacaaggatagccttccgaaaggaggattaatacttgatagtactctaagatggcatcaaaacagagttaaagatttatcggtagtggatgg

SEQ ID NO: 1575 - DNA, 225 bp, Unknown
  Encodes 16S rRNA from Bosea
agagtttgatcctggctcagagcgaacgctggcggcaggcttaacacatgcaagtcgaacgcatccttcgggatgagtggcagacgggtgagtaacacgtgggaacgtacctctttgttcggaataactcatggaaacgtgagctaataccggatacgcccttttggggaaagatttatcgcagagagatcggcccgcgtctgattagctagttggtgaggtaat

SEQ ID NO: 1576 - DNA, 225 bp, Unknown
  Encodes 16S rRNA from Enterococcus
agagtttgatcctggctcaggacgaacgctggcggcgtgcctaatacatgcaagttgaacgcttctttctgatcgaacttcggttcaccaagaaagaagagtagcgaacgggtgagtaacacgtgggtaacctgcccatcagcgggggataacacttggaaacaggtgctaataccgcataatactttttctctcatgagtgaaagttgaaaggcgcttttgcgt

SEQ ID NO: 1577 - DNA, 225 bp, Unknown
  Encodes 16S rRNA from Clostridium III
agagtttgatcatggctcaggacgaacgctggcggcgtgcctaacacatgcaagtcgaacggagctatttagacagaacccttcggggggaagattacttagcttagtggcggacgggtgagtaacgcgtgagtaacctgcccataagagggggataacacagagaaatttgtgctaataccgcatatagatataatatcgcatggtaatgtattgaaagattta

SEQ ID NO: 1578 - DNA, 225 bp, Unknown
  Encodes 16S rRNA from Xanthobacter
agagtttgatcatggctcagagcgaacgctggcggcaggcctaacacatgcaagtcgagcgcccagcaatgggagcggcagacgggtgagtaacgcgtggggatctacccattggtacggaataacccagggaaacttggactaataccgtatgtgtccttcgggagaaagatttatcgccaatggatgaacccgcgtctgattagctagttggtgaggtaaagg

SEQ ID NO: 1579 - DNA, 225 bp, Unknown
  Encodes 16S rRNA from Lactobacillus
agagtttgatcatggctcaggacgaacgctggcggcatgcctaatacatgcaagtcgaacgagttcccgttgattgacgtgcttgcactgatttcaacattggaacgagtggcgaactggtgagtaacacgtggaaaacctgcccagaagcaggggataacacttggaaacaggtgctaataccgtataacaacaaaaaccgcatggtttttgtttgaaaggtgg

SEQ ID NO: 1580 - DNA, 225 bp, Unknown
  Encodes 16S rRNA from Prevotella
gctttgatcatggctccggatgcacgctcgctccaggcttaacacatgccagtcgaggggtaacggcagtgaagcttgctttactggccgacgaccggcgcacgggtgagtaacgcgtatccaacctgcccatgactcagggataacctttcgaaagggagcctaatacctgatgttgtgagacgagggcatctgagtgtcaccaaagattcatcggtcatggat

SEQ ID NO: 1581 - DNA, 225 bp, Unknown
  Encodes 16S rRNA from Acidaminococcus
agagtttgatcatggctcaggacgaacgctggcggcgtgcttaacacatgcaagtcgaacgggaaacttatttcggtaagtttctagtggcgaacgggtgagtaacgcgtgggtaacctgccctccagatggggacaacattccgaaagggatgctaataccgaatacgatccctccaccgcatggaggagggatgaaagatggcctctgcttgcaagctatcgc

SEQ ID NO: 1582 - DNA, 225 bp, Unknown
  Encodes 16S rRNA from Eubacterium
aggtttgatcctggctcaggatgaacgctggcggcgtgcctaacacatgcaagtcgagcgagaaacctatgtgatgaaacttcggtagaatcttttaggtggaaagcggcggacgggtgagtaacgcgtaggcaacctgcccctagcagggggatagccattggaaacgatgattaaaaccccataatgcagatttatcacatgttggatctgccaaagatttat

SEQ ID NO: 1583 - DNA, 225 bp, Unknown
  Encodes 16S rRNA from Bacteroides
agagtttgatcctggctcaggatgaacgctagctacaggcttaacacatgcaagtcgaggggcagcatgatcgaagcttgctttgatcgatggcgaccggcgcacgggtgcgtaacacgtatccaatctacccaccgctcagggatagccttgcgaaagtaagattaatacctgatggtttccttatgtggcatcatgtatggaataaagattcatcggcgatgg

SEQ ID NO: 1584 - DNA, 225 bp, Unknown
  Encodes 16S rRNA from Clostridium XlVa
agagtttgatcctggctcaggataaacgctggcggcgcacataagacatgcaagtcgaacgaacgacttcaaattgttttactttttgaagaagttagtggcggactggtgaggaacacgtaaacaatctgcctataagaggggaacaacattgagaaatcagtgctaataccgcataagcctacgctatcgcatgataaagtaggaaaaggagtaatccgctta

SEQ ID NO: 1585 - DNA, 225 bp, Unknown
  Encodes 16S rRNA from Lactobacillus
agagtttgatcctggctcaggacgaacgctggcggcatgcctaatacatgcaagtcgaacgagcttccgttgaatgacgtgcttgcactgattttaacaatgaagcgagtggcgaactggtgagtaacacgtgggaaatctgcccagaagcaggggataacacttggaaacaggtgctaataccgtataacaacaaaatccgcatggattttgtttgaaaggtgg

SEQ ID NO: 1586 - DNA, 225 bp, Unknown
  Encodes 16S rRNA from Devosia
agagtttgatcctggctcagaacgaacgctggcggcaggcttaacacatgcaagtcgaacggtctcttcggaggcagtggcagacgggtgagtaacgcgtgggaatctacctagttctacggaacaacagttggaaacgactgctaataccgtatacgccctatgggggaaagatttatcggaattagatgagcccgcgtaagattagctagttggtgaggtaat

SEQ ID NO: 1587 - DNA, 225 bp, Unknown
  Encodes 16S rRNA from Pedobacter
agagtttgatcatggctcaggatgaacgctagcggcaggcttaacacatgcaagtcgaggggcagcgcgggggtagcaatacacctggcggcgaccggcggaagggtgcgtaacgcgtgagcaacatgcccgtcacagggggataaaagatggaaacgtctcctaataccccgtaacatcatttgtggcatcgcagatggttgaaagctattatgcggtgacgga

SEQ ID NO: 1588 - DNA, 225 bp, Unknown
  Encodes 16S rRNA from Clostridium IV
agagtttgatcctggctcaggacgaacgctggcggcgtgcttaacacatgcaagtcgaacgggactgcccgaatgaagttttcggatggaatttgggtatgtttagtggcgaacgggtgagtaacgcgtgagtaacctgccttggagagggggacaacagccggaaacggctgctaataccgcatgacgtcacgggagggcatccttctgtgaccaaagatttat

SEQ ID NO: 1589 - DNA, 225 bp, Unknown
  Encodes 16S rRNA from Clostridium XlVa
agagtttgatcatggctcaggatgaacgctggcggcgtgcctaacacatgcaagtcgaacgaagcacttctcccgttgaagttgattagcttgctatgaagcggaaacatttgaagtgacttagtggcggacgggtgagtaacgcgtgggtaacctgccctgtactgggggacaacagttggaaacggctgctaataccgcataagcgcacagcatcgcatggtg

SEQ ID NO: 1590 - DNA, 225 bp, Unknown
  Encodes 16S rRNA from Corynebacterium
agagtttgatcatggctcaggatgaacgctggcggcgtgcttaacacatgcaagtcgaacggaaaggccttgtgcttgcacaaggtactcgagtggcgaacgggtgagtaacacgtgggtgatctgccctgcactgtgggataagcctgggaaactgggtctaataccatataggaccgcactttggatggtgtggtggaaagcttttgcggtgtgggatgagcc

SEQ ID NO: 1591 - DNA, 225 bp, Unknown
  Encodes 16S rRNA from Spirochaeta
agagtttgatcctggctcagaacgaacgctggcggcgcgtcttaagcatgcaagtcgagcgggattatggtgcttgcaccatatgagagcggcggactggtgagtaacgcgtaggtgacgaaccccccggacggggacagcctctagaaatagagggtaataccggatgaggcgtgcagtgttagaggctgcacgtgaaagcagctccggctgcgccgggggatc

SEQ ID NO: 1592 - DNA, 225 bp, Unknown
  Encodes 16S rRNA from Anaeroplasma
agagtttgatcatggctcaggatgaacgctggcggcgtgcctaatacatgcaagtcgaacgaggtttctcttcggggaaaccgagtggcgaacgggtgagtaacacataggtaatctacctttcagaatgggatacccaagagaaattttggctaataccgtatacaatcatttctccgcatggagatttgatgaaaggggctccaaagcctcgctgttagatga

SEQ ID NO: 1593 - DNA, 225 bp, Unknown
  Encodes 16S rRNA from Clostridium XlVa
agagtttgatcatggctcaggatgaacgctggcggcgtgcttaacacatgcaagtcgaacgaggaatttcagatgaagttttcggatggattctggctttccgagtggcggacgggtgagtaacgcgtgggtaacctgccttacacagggggacaacagccggaaacggctgctaataccgcataacctgctagagtcgcatgactcagacagaaaagatttatc

SEQ ID NO: 1594 - DNA, 183 bp, Unknown
  Encodes 16S rRNA from Lachnospiracea incertae sedis
agagtttgatcatggctcaggataaacgctggcggcgtgctttggacaatgggggcaaccctgatccagcgacgccgcgtgaacgaagaagtatctcggtatgtaaagttctatcagcagggaagataatgacggtacctgactaagaagcaccggctaaatacgtgccagcagccgcgtaat

SEQ ID NO: 1595 - DNA, 225 bp, Unknown
  Encodes 16S rRNA from Saccharofermentans
agagtttgatcatggctcaggacgaacgctggcggcgtgcctaacacatgcaagtcgagcgaggacaatggtttcggctgttgttcgagcggcggacgggtgagtaacgcgtgaacaatctgtccctgacagggggataacacttggaaacaggtgctaataccgcataagaccacgggatcgcatggtactggggtcaaaggagcaatccggtgaggggtgagt

SEQ ID NO: 1596 - DNA, 225 bp, Unknown
  Encodes 16S rRNA from Slackia
agagtttgatcatggctcaggatgaacgccggcggcgcgcctaacacatgcaagtcgagcggcggaccggctccggccggcgagcagcggcgaacgggtgagtaacgcgtgggcaacctgccccccccctcgggaatagcggccggaaacggccggtaatgcccgacggcccccgggagaggcatctcccccggggcaaagccctggcggggggggatgggcccg

SEQ ID NO: 1597 - DNA, 225 bp, Unknown
  Encodes 16S rRNA from Limibacter
agagtttgatcatggctcaggatgaacgctggcggcaggcctaatacatgcaagtcgcacgggatcgctccttcgggggcgtgagagtggcggacgggtgcgcaacgcgtatgcaaccagccccctgcaggcggatagccggtggaaacgccggataatacgccatgtttcgggtagagggcatcctttacctgagaaagcggagacgcggcgggggacgggcat

SEQ ID NO: 1598 - DNA, 225 bp, Unknown
  Encodes 16S rRNA from Sphingobium
agagtttgatcatggctcagagcgaacgctagcggcatgctttatacatgcaagtcgaacgaacgagtttatattgagtagcaatacgatttataaatgagttagtggcgaacgggtgagtaatatataggaatttgcccagtagtgggggacaacagttagaaatgactgctaataccgcatacgtccgagaggagaaagatttatcgctattggagaagccta

SEQ ID NO: 1599 - DNA, 225 bp, Unknown
  Encodes 16S rRNA from Clostridium XlVa
agagtttgatcatggctcaggatgaacgctggcggcgtgcttaacacatgcaagtcgaacgaagcatctttatatgatccctttggggtgatgaattgatgactgagtggcggacgggtgagtaacgcgtgggaaacctgccctgtaccgggggatagcagttggaaacggctgataataccgcataagcgcacagtaagacatcttaccgtgtgaaaaactccg

SEQ ID NO: 1600 - DNA, 225 bp, Unknown
  Encodes 16S rRNA from Riemerella
agagtttgatcatggctcaggatgaacgctagcgggaggcctaacacatgcaagccgagcgggatttagtagttagcttgctaactactgatgagagcggcgtacgggtgcggaacacgtgtgcaacctgcctttatctgggagatagcctttcgaaaggaagattaatatcccataatatattgattggcatcgattaatattgaaagctccggcggataaaga

SEQ ID NO: 1601 - DNA, 225 bp, Unknown
  Encodes 16S rRNA from Saccharofermentans
agagtttgatcatggctcaggacgaacgctggcggcgtgcctaacacatgcaagtcgagcggactttcatcaggaaggtgcttgcaccggaaagatggaagttagcggcggacgggtgagtaacgcgtgagcaatctgtcccatacagggggataataccgcgaaagaggttctaataccgcatgagaccacagtgaggcatctcacaggggtcaaaggagcaat

SEQ ID NO: 1602 - DNA, 225 bp, Unknown
  Encodes 16S rRNA from Bacteroides
agagtttgatcctggctcaggatgaacgctagctacaggcttaacacatgcaagtcgaggggcagcaggagattagcttgctaatcttgctggcgaccggcgcacgggtgagtaacgcgtatccaacctgccccgtactcggggacagccctctgaaaggaggattaatacccgatattgtcgctgtgggacatcccatggtgacgaaagattcatcggtacggc

SEQ ID NO: 1603 - DNA, 225 bp, Unknown
  Encodes 16S rRNA from Prevotella
agagtttgatcatggctcaggatgaacgctagctacaggcttaacacatgcaagtcgaggggcagcacggggtatggcttgccataccctggtggcgaccggcgcacgggtgagtaacgcgtatccaacctgcccgcaaccgcggaatagcccgccgaaaggcggattaatgccgcatgagctcgcgtgggggcatctgcccgcgagcaaaggtccattccggtt

SEQ ID NO: 1604 - DNA, 225 bp, Unknown
  Encodes 16S rRNA from Selenomonas
agagtttgatcctggctcaggacgaacgctggcggcgtgcttaacacatgcaagtcgaacggggcgattgaaagcttgcttttatgagcctagtggcaaacgggtgagtaacgcgtgggcaacctaccggaaagatggggacaacatcccgaaaggggtgctaataccgaatgttgtatatgaggcgcatgcttcatatattaaaggattctatccgctttccga

SEQ ID NO: 1605 - DNA, 225 bp, Unknown
  Encodes 16S rRNA from Victivallis
agagtttgatcctggctcagaacgaacgctggcggcatggattaggcatgcaagtcgaacgaagcagcaatgcttagtggcgcaagggtgaggaacgcgtgagtgacctacccgcaagtttggaacagctcctggaaacgggaattaataccggatgtgatcatagggctgcatggttttatgattaaagcagcaatgcgcttgcggatgggctcgcgtcccatt

SEQ ID NO: 1606 - DNA, 225 bp, Unknown
  Encodes 16S rRNA from Howardella
agagtttgatcatggctcaggataaacgctggcggcgcacataagacatgcaagtcgaacggacttaacttctagcttgctagaagagcggttagtggcggactggtgagtaacacgtaagaaatctgcctatcagaggggaataacagtgagaaatcactgctaataccgcatatgccatagttatcgcatgatgacagtgggaaagaagcaattcgctgatag

SEQ ID NO: 1607 - DNA, 225 bp, Unknown
  Encodes 16S rRNA from Pelospora
agagtttgatcatggctcaggatgaacgctggcggcgcgcctaacacatgcaagtcgaacgaaatgagtagcttcggttacgagtttagtggcggacgggtgagtaacgcgtggataatttgcctttcagtgggggatagctgagagaaatctcaattaataccgcataacataatttgttcgcatgagtgagttattaaagatgcaaatcgctggaagagaagt

SEQ ID NO: 1608 - DNA, 225 bp, Unknown
  Encodes 16S rRNA from Clostridium sensu stricto
agagtttgatcatggctcaggacgaacgctggcggcgcgcctaacacatgcaagtcgaacgggactagtgaccggagcttagaggctttctaggttgcgatcactagttcagtggcggacgggtgagtaaagcatgagtaactttcccataagtggggaatagcttttggaaacagaagataataccgcatgaatcgttgaggacacatgttcacaacggaaaag

SEQ ID NO: 1609 - DNA, 225 bp, Unknown
  Encodes 16S rRNA from Selenomonas
agagtttgatcatggctcagattgaacgctggcggcgtgcttaacacatgcaagtcgaacgagacggatagaagcttgcttttagaagtcgagtggcaaacgggtgagtaacgcgtagacaacctgcctctgggatggggacaacagcccgaaagggctgctaataccgaatgaaatggtttcttctcctgaagagatcatgaaagatggcctctaaattatgct

SEQ ID NO: 1610 - DNA, 225 bp, Unknown
  Encodes 16S rRNA from Fibrobacter
agagtttgatcctggctcaggatgaacgctagcgacaggcctaacacatgcaagtcgagcgaggacgtagcaatacgagccgagcggcgaatgggtgagtaacgcgtaagcaatctgccccgcattccggaacaaccgtgccaacgcgcggctaatgccgggagccgtggcggtccacatgggccgttgacgaaagatttatcgatgcgggatgagcttgcgtcc

SEQ ID NO: 1611 - DNA, 225 bp, Unknown
  Encodes 16S rRNA from Clostridium III
agagtttgatcctggctcaggacgaacgctggcggcgtgcctaacacatgcaagtcgaacgagaagtcttgaaatgattccttcgggatgaatggatagatggacagtggcggacgggcgagtaacgcgtgagtaacctgcccataagcgggggatagccgatggaaacgtcgagtaataccccatgacataattgagtcgcatggcttaattatcaaagattta

SEQ ID NO: 1612 - DNA, 225 bp, Unknown
  Encodes 16S rRNA from Sphingomonas
agagtttgatcatggctcagaacgaacgctggcggcatgcctaacacatgcaagtcgaacgagatcttcggatctagtggcgcacgggtgcgtaacgcgtgggaatctgccctttggttcggaataacagttggaaacgactgctaataccggatgatgacgtaagtccaaagatttatcgccagaggatgagcccgcgtaggattagctagttggtgtggtaag

SEQ ID NO: 1613 - DNA, 225 bp, Unknown
  Encodes 16S rRNA from Selenomonas
agagtttgatcatggctcaggacgaacgctggcggcgtgcttaacacatgcaagtcgaacggggcgattgaaagcttgcttttgagagcctagtggcaaacgggtgagtaacgcgtaggcaacctgccttcgggatggggacaacaggacgaaagccctgctaataccgaatgaagcatcctccctgcatggggagggtatgaaagatggcctctgaatatgcta

SEQ ID NO: 1614 - DNA, 225 bp, Unknown
  Encodes 16S rRNA from Eggerthella
agagtttgatcctggctcaggatgaacgctggcggcgtgcctaacacatgcaagtcgaacgatgaaaccgccctcgggcggacatgaagtggcgaacgggtgagtaacacgtgaccaacctgccccgcgctccgggacagcctcgcgaaagcgggattaataccggatgcgccccggcggccgcatggccgccgggggaaagccctaagcggcgcgggatggggt

SEQ ID NO: 1615 - DNA, 225 bp, Unknown
  Encodes 16S rRNA from Treponema
agagtttgatcatggctcagaacgaacgctggcggcgcgtcttaagcatgcaagtcgggcgggattccccagcttgctggggatgagagcggcggactggtgagtaacgcgtgggcgacgcgccccgtggaccgggatagcctgtggaaacacagggtaataccgggcgagctcccccgcgccggaggcgggggaggaaaggagccgaggctccgccacgggagc

SEQ ID NO: 1616 - DNA, 225 bp, Unknown
  Encodes 16S rRNA from Mogibacterium
agagtttgatcatggctcaggatgaacgctggcggcgtgcctaatacatgcaagtcgagcgagaaattaatcagaggcgttttcggacaagtcagattaatggaaagcggcggacgggtgagtaacgcgtaggcaacctgcccttagcagagggatagccattggaaacgatgattaaaacctcataacgccaactcaacacatgttgagctggccaaagattta

SEQ ID NO: 1617 - DNA, 225 bp, Unknown
  Encodes 16S rRNA from Adlercreutzia
agagtttgatcatggctcaggatgaacgctggcggcgtgcctaacacatgcaagtcgaacagttaaaccggcttcggccggaaatagagtggcgaacgggtgagtaacacgtgaccaacctgccccgcgcaccgggatagccccccgaaagggggattaataccggatgcgccgggagggccgcatggccctcccgggaaagcccaggcggcgcgggatggggtc

SEQ ID NO: 1618 - DNA, 225 bp, Unknown
  Encodes 16S rRNA from Selenomonas
agagtttgatcctggctcaggacgaacgctggcggcgtgcttaacacatgcaagtcgaacgagacgattttaagcttgcttagatgagtcgagtggcaaacgggtgagtaacgcgtagacaacctgccgcaaagatggggacaacagtccgaaaggactgctaataccgaatgttgtcagttttccgcatgggagactgattaaagatggcctctacttgtaagc

SEQ ID NO: 1619 - DNA, 225 bp, Unknown
  Encodes 16S rRNA from Methylomicrobium
agagtttgatcctggctcagattgaacgctggcggcgtgcttaacacatgcaagtcgagcggtagcaggcgtagcaatacgtgctgacgagcggcgaacgggtgagtaatgcttaggaatcttcctcgtagtggggaataacttggggaaactcaagctaataccgcatacgaactacggttgaaagcgggggatcgcaagacctcgcgctatgagatgagccta

SEQ ID NO: 1620 - DNA, 225 bp, Unknown
  Encodes 16S rRNA from Leuconostoc
agagtttgatcctggctcaggatgaacgctggcggcgtgcctaatacatgcaagtcgaacgcacagcgaaaggtgcttgcacctttcaagtgagtggcgaacgggtgagtaacacgtggacaacctgcctcaaggctggggataacatttggaaacagatgctaataccgaatgaaacttagtgtcgcatgacacaaagttaaaaggcgctttggcgtcacctag

SEQ ID NO: 1621 - DNA, 225 bp, Unknown
  Encodes 16S rRNA from Pyramidobacter
agagtttgatcatggctcagattgaacgctggcggcgtgcttaacacatgcaagttgtgcggcgagttttcgaagaagacttcggttggaattggaaatgagcagcagcggacgggtgagtaaagcacaaggacgtgtcctgcagagggggacaactacgggaaaccgcagctaataccccatacgccgagaggtgaaagcagcaatgcgctggaggagcggctt

SEQ ID NO: 1622 - DNA, 225 bp, Unknown
  Encodes 16S rRNA from Butyrivibrio
agagtttgatcctggctcaggatgaacgctggcggcgtgcctaacacatgcaagtcgaacggtgctttgcggtgatgaagcttcggcagattcttgtaaagcatagtggcggacgggtgagtaacgcgtgggcaacctgcctctcagtgggggatagcagctggaaacggctggtaataccgcatatgcgcacggttccgcatggaacagtgtgaaaagatatat

SEQ ID NO: 1623 - DNA, 225 bp, Unknown
  Encodes 16S rRNA from Bacteroides
agagtttgatcctggctcaggatgaacgctagctacaggcttaacacatgcaagtcgaggggcagcgggaggtcagcttgctgacttcgccggcgaccggcgcacgggtgagtaacacgtatccaacctgccgcgcactccgggacagccctctgaaaggaggattaataccggatggtgtcatggagggacatcccttcgtgactaaagattcatcggtgcgcc

SEQ ID NO: 1624 - DNA, 225 bp, Unknown
  Encodes 16S rRNA from Butyricimonas
agagtttgatcatggctcaggatgaacgctagcggcaggcttaacacatgcaagtcgaggggcagcgcgggagtagcaatacacctggcggcgaccggcggaagggtgcgtaacgcgtgagcaacatacccgtcactgggggataacagttggaaacgactcctaataccccataatacaagaggtgacatcatcttttgttgaaagttacggcggtgacggatt

SEQ ID NO: 1625 - DNA, 225 bp, Unknown
  Encodes 16S rRNA from Ruminococcus
agagtttgatcatggctcaggacgaacgctggcggcacgcctaacacatgcaagtcgaacggtgaatacttagcttgctttgtattcatagtggcggacgggtgagtaacacgtgagcaacctgcctctgagagagggatagcttctggaaacggatggtaatacctcatgatatagcgttctcgcatgggaatgttatcaaatgaatttcgctcagagatgggc

SEQ ID NO: 1626 - DNA, 225 bp, Unknown
  Encodes 16S rRNA from Clostridium sensu stricto
agagtttgatcctggctcaggacgaacgctggcggcgcgcctaacacatgcaagtcgaacgggactagtgaccggagcttagaggtaatttgtctaggttgcgatcactagttcagtggcggacgggtgagtaaagcatgagtaactttcccataagtggggaatagcttttggaaacagaagataataccgcataaatcgttgagggcacatgctcacaacgga

SEQ ID NO: 1627 - DNA, 225 bp, Unknown
  Encodes 16S rRNA from Butyrivibrio
agagtttgatcctggctcaggatgaacgctggcggcgtgcctaacacatgcaagtcgaacggggttatctcgccgttgaagcttcggcagagacatgaggtaacttagtggcggacgggtgagtaacgcgtgggcaacctgccccgtaccgggggatagcagttggaaacgactgataataccgcataagcgcacggtgtggcatcacacagtgtgaaaaactcc

SEQ ID NO: 1628 - DNA, 225 bp, Unknown
  Encodes 16S rRNA from Corynebacterium
agagtttgatcatggctcaggatgaacgctggcggcgtgcttaacacatgcaagtcgaacggaaaggcctcagcttgctggggtactcgagtggcgaacgggtgagtaacacgtgggtgatctgccctgcactttgggataagcccgggaaactgggtctaataccgaatatgaccacttcttggatgttgtggtggaaagcttttgcggtgtgggatgagcctg

SEQ ID NO: 1629 - DNA, 225 bp, Unknown
  Encodes 16S rRNA from Proteiniborus
agagtttgatcctggctcaggatgaacgctggcggcgtgcttaacacatgcaagtcgagcgagaactcgctcagccgattcttcggaagaaagcagagcgacggaaagcggcggacgggtgagtaacgcgtgggaaacctgccctgtgcagggggacagccgagggaaacttcgattaataccccataacaccaaagcatcgcatggtgcaatggtcaaagattt

SEQ ID NO: 1630 - DNA, 225 bp, Unknown
  Encodes 16S rRNA from Spirochaeta
agagtttgatcctggctcagaacgaacgctggcggcgcgtcttaagcatgcaagtcgagcgggaagaagtagcttgctacttctgagagcggcggactggtgagtaacgcgtgggtgacgcacccctgtgtcggggacagcccgtggaaacacggagtgataccggatacggtcccatggatcagaaacatgggaggaaaggagctacggcttcgcacggggagc

SEQ ID NO: 1631 - DNA, 225 bp, Unknown
  Encodes 16S rRNA from Acetitomaculum
agagtttgatcctggctcaggatgaacgctggcggcgtgcctaacacatgcaagtcgaacggggtatagacgctgaagaggtttcgactgattcttgtttatacttagtggcggacgggtgagtaacgcgtgggcaacctgccctgtactgggggatagcagctggaaacggctggtaataccgcataagcgcacgataccgcatggtatagtgtgaaaagctcc

SEQ ID NO: 1632 - DNA, 225 bp, Unknown
  Encodes 16S rRNA from Selenomonas
agagtttgatcctggctcaggacgaacgctggcggcgtgcttaacacatgcaagtcgaacggggcgattagaagcttgcttttatgagcctagtggcaaacgggtgagtaacgcgtaggcaacctgcctttgggatggggacaacaggacgaaagccctgctaataccgaatgaagtagtctttccgcatggagggactatgaaagatggcctctacatgtaagc

SEQ ID NO: 1633 - DNA, 225 bp, Unknown
  Encodes 16S rRNA from Altererythrobacter
agagtttgatcctggctcagaacgaacgctggcggcatgcttaacacatgcaagtcgaacggtaatgtatagtacttgtattatatattatagtggcaaacgggtgagtaacgcgtggggacgtacccttcagtaatgaataacggatggaaacgtacgctaatacattataggattgagagatgaaagagagatcgctgagggagcggcccgcgttagattagg

SEQ ID NO: 1634 - DNA, 225 bp, Unknown
  Encodes 16S rRNA from Atopobium
agagtttgatcatggctcaggatgaacgctggcggcgcgcctaacacatgcaagtcgaacggttaagaccccttcgggggtgaataaagtggcgaacggctgagtaacacgtgggcaacctacctcttgctctgggatagcctcgggaaaccgtgggtaataccggatactctgtaactgtcgcatggcggatacaggaaagcgcatacggcaagagatgggccc

SEQ ID NO: 1635 - DNA, 225 bp, Unknown
  Encodes 16S rRNA from Clostridium IV
agagtttgatcctggctcaggacgaacgctggcggcgtgcctaacacatgcaagtcgaacggacttagttggatgcttgcatccggcgacagttagtggcggacgggtgagtaacgcgtgaataacctgcccaacagagggggataacgtttggaaacgaacgctaataccgcataacattatggtaccgcatggtattataatcaaaggagcaatccgctgatg

SEQ ID NO: 1636 - DNA, 225 bp, Unknown
  Encodes 16S rRNA from Clostridium XlVa
agagtttgatcatggctcaggatgaacgctggcggcgtgcctaacacatgcaagtcgagcggaccttagagagtgaacagcttgctgggatctttcgaaaggttagcggcggacgggtgagtaacgcgtgggtaacctgcctcatacagggggatagcagttggaaacgactggtaataccgcataagcgcacagtaccgcatggtatagtgtgaaaaactccgg

SEQ ID NO: 1637 - DNA, 225 bp, Unknown
  Encodes 16S rRNA from Clostridium XlVa
agagtttgatcatggctcaggatgaacgctggcggcgtgcctaacacatgcaagtcgaacgggaacctcatagtggagacttcggtcaaagcagtgagaattctagtggcggacgggtgagtaacgcgtggataacctgcctttaagaattggataacagtgagaaatcattgctaatacaatataagcttacagtctcgcatgagacagtgagaaaagatttat

SEQ ID NO: 1638 - DNA, 225 bp, Unknown
  Encodes 16S rRNA from Clostridium IV
agagtttgatcatggctcaggatgaacgctggcggcgtgcataacacattcaagtcgaacgggactaaaccgattaatccttcgggaagcgttgatttagtttagtggcggacgggtgagtaacgcgtgagcaacctgccttgaagagggggataacacagggaaacttgtgctaataccgcataacatatgacgatcgcatggtcgacatatcaaagctccgac

SEQ ID NO: 1639 - DNA, 225 bp, Unknown
  Encodes 16S rRNA from Clostridium III
agagtttgatcctggctcaggacgaacgctggcggcgtgcctaacacatgcaagtcgaacgagaagtcttgaaatgatcccttcggggtgaatggatagatggacagtggcggacgggcgagtaacgcgtgagtaacctgcccataagagagggatagccgatggaaacgtcgagtaatacctcatattgtagttaattcgcatggattgattatgaaagattta

SEQ ID NO: 1640 - DNA, 225 bp, Unknown
  Encodes 16S rRNA from unknown taxa
agagtttgatcatggctcaggatgaatgctggcggcgtgcctaatacatgcaagtcgagcggtaacagggggactcaccgtgctcttgacactcttgcctatgaggaagaggtcggatcgagagtacagtgagtccctgctgacgagcggcggacggctgagtaacgcgtgggaacataccccaaactgagggataactagtcgaaagattagctaataccgcat

SEQ ID NO: 1641 - DNA, 225 bp, Unknown
  Encodes 16S rRNA from Desulfotomaculum
agagtttgatcatggctcaggacgaacgctggcggcgtgcttaatacatgcaagtcgaacggagatattccgccgttcaaggtttcggctgagaacatgggatatcttagtggcgaacgggtgagtaacgcgtgaacaacctgactcaaagagggggataacaacgggaaactgttgctaataccgcataagaccacagtgtcgcatggcacaggggtcaaagat

SEQ ID NO: 1642 - DNA, 225 bp, Unknown
  Encodes 16S rRNA from Pedobacter
agagtttgatcctggctcaggatgaacgctagcggcaggcctaatacatgcaagtcggacggtaagtgccccttcgggggcacgagagtggcggacgggtgcgtaacgcgtatgcaaccaacccccgtcatccggatagccggtggaaacgccggataatacggaatgaacccttcggtgggcatccaccggagggcaaggcggcgacgcggacggggacgggca

SEQ ID NO: 1643 - DNA, 162 bp, Unknown
  Encodes 16S rRNA from Bacteroides
agagtttgatcatggctcaggatgaacgctagctacaggcttaacacatgcaagtcgaggggcagcatgaactcgagaaagggtgctgttcaaatagggcagtattcagatgttagaaaaagaataagtaccggcaaactccgtgccagcagccgcggtaat

SEQ ID NO: 1644 - DNA, 225 bp, Unknown
  Encodes 16S rRNA from Asaccharobacter
agagtttgatcatggctcaggatgaacgctggcggcgtgcttaacacatgcaagtcgaacgggaaagcgccctcgggcgcgagtacagtggcgaacgggtgagtaacacgtgaccaacctgccccccgcaccgggatagccgggcgaaagcccgggtaataccggatgaccccgcaccgcggcatcgcggcgcgggcaaagcccagacggcgggggatggggtcg

SEQ ID NO: 1645 - DNA, 225 bp, Unknown
  Encodes 16S rRNA from Microbacterium
agagtttgatcatggctcaggacgaacgctggcggcgtgcttaacacatgcaagtcgaacggtgaaggcggagcttgctctgctggatcagtggcgaacgggtgagtaacacgtgagcaatctgccccgaactctgggataagcgctggaaacggcgtctaataccggatacgacacgggagggcatcctctccgtgtggaaagatttttcggttcgggatgagc

SEQ ID NO: 1646 - DNA, 225 bp, Unknown
  Encodes 16S rRNA from Treponema
agagtttgatcatggctcagaacgaacgccggcggcgcgtcttaagcatgcaagtcgggcgggatcagggtgcttgcaccctgtgagagcggcggactggcgaggaacgcgtgggcgacgtgccctccgcaccgggacagccggcagaaatgccgggtgatacgggatgagctcgtgcgatgtggtgttgtacgaggaaagctgccacggcagcggcggaggagc

SEQ ID NO: 1647 - DNA, 225 bp, Unknown
  Encodes 16S rRNA from Dethiosulfovibrio
agagtttgatcatggctcaggatgaacgctggcggcgtgcataacacattcaagtcgaacgaagcactttggcggaagccttcgggtggaagctgatttgacttagtggcggacgggtgagtaacgcgtgagcaacctgcctggctgtgagggataacacagggaaacttgtgctaataccacatgacgcatggagatcgcatgttttccatgccaaagatatat

SEQ ID NO: 1648 - DNA, 225 bp, Unknown
  Encodes 16S rRNA from Oscillibacter
agagtttgatcatggctcaggacgaacgctggcggcgtgcctaacacatgcaagtcgaacgaagctctttgaagggcggcttcggccaaacggatgagatgacttagtggcgaacgggtgagtaacgcgtgaggaacctgcctttcagtgggggacaacagttggaaacgactgctaataccgcataacgtacagaggtcgcatgaccattgtaccaaagattta

SEQ ID NO: 1649 - DNA, 225 bp, Unknown
  Encodes 16S rRNA from Selenomonas
agagtttgatcatggctcaggacgaacgctggcggcgtgcttaacacatgcaagtcgaacgagggaattagaagcttgcttttatgacccgagtggcaaacgggtgagtaacgcgtagacaacctgcctctcagatggggacaacagcccgaaagggctgctaataccgaatgttgtatttcttccgcatggaggagatattaaagatggcctctacttgtaagc

SEQ ID NO: 1650 - DNA, 225 bp, Unknown
  Encodes 16S rRNA from Eubacterium
agagtttgatcctggctcaggacgaacgctggcggcgtgcttaacacatgcaagtcgaacgaagcttgacgaatgattccttcgggatgatttctgatatgactgagtggcggacgggtgagtaacgcgtgagtaacctgcctcttggagggggatagtgtttggaaacgaacagtaataccgcataacgtgtacggatggcatcttctgtataccaaagattta

SEQ ID NO: 1651 - DNA, 225 bp, Unknown
  Encodes 16S rRNA from Ruminococcus
agagtttgatcctggctcaggacgaacgctggcggcacgcttaacacatgcaagtcgaacggagatattcccttcgggggataacttagtggcggacgggtgagtaacacgtgagcaacctgccttacagagaggaataatgactggaaacggtcactaatacctcataaaatatttgaatcgcatggtttggatatcaaagaataatcgctgtaagatgggctc

SEQ ID NO: 1652 - DNA, 225 bp, Unknown; identical to SEQ ID NO: 265
  Encodes 16S rRNA from Treponema

SEQ ID NO: 1653 - DNA, 225 bp, Unknown
  Encodes 16S rRNA from Spirochaeta
agagtttgatcatggctcagaacgaacgctggcggcgcgtcttaagcatgcaagtcgagcggcaagacagtgcttgcactgtcctagagcggcggactggtgagtaacacgtgggttacgtaccctccggacggggatagcctgtggaaacacagggtaataccggatacggcggcacagcatggagttgtgtcgggaaaggagcttcggctccgccggaggatc

SEQ ID NO: 1654 - DNA, 225 bp, Unknown
  Encodes 16S rRNA from Roseburia
agagtttgatcatggctcaggatgaacgctggcggcgtgcctaacacatgcaagtcgagcggacctgattaagtgattagcttgctaagaacttatgactggttagcggcggacgggtgagtaacgcgtgggtaacctgcctcatacagggggatagcagttggaaacgactggtaataccgcataagcgcacggtaccgcatggtacagtgtgaaaaactccgg

SEQ ID NO: 1655 - DNA, 225 bp, Unknown
  Encodes 16S rRNA from Ruminococcus
agagtttgatcatggctcaggacgaacgctggcggcgcgcctaacacatgcaagtcgaacggggcacgatttagatttcttcggaatgatagattattgcttagtggcggacgggtgagtaatacgtgagtaatctgccttatagatggggataacgatcagaaatggtcgctaataccctataatgtatgttttccgcatggttagcataccaaagggattcgc

SEQ ID NO: 1656 - DNA, 225 bp, Unknown
  Encodes 16S rRNA from Butyricimonas
agagtttgatcctggctcaggatgaacgctagcggcaggcttaacacatgcaagtcgaggggcagcgcgattgtagcaatacgattggcggcgaccggcgcaagggtgcgtaacgcgtgagcaacatacccgcaacagggggataagcgatggaaacgtcgtctaataccccatggagaccaagggcggcatcgtccatggcctaaacccacgggggttgcggat

SEQ ID NO: 1657 - DNA, 225 bp, Unknown
  Encodes 16S rRNA from Pedobacter
agagtttgatcatggctcaggatgaacgctagcggcaggcctaatacatgcaagtcgaacgggagggggcccttcggggcctccgagagtggcgcacgggtgcgtaacgcgtatgcaaccaaccccgcactgggggacagccggtggaaacgccgggtaataccccatgccgacgggaggggacatccccatccgttgaaaggcttcggtcggtgcgggacgggc

SEQ ID NO: 1658 - DNA, 225 bp, Unknown
  Encodes 16S rRNA from Spirochaeta
agagtttgatcctggctcagaacgaacgctggcggcgcgtcttaagcatgcaagtcgaacggcaagatggagcttgctccatcctagagtggcggactggtgagtaacacgtgggtgacatgcctttcagttggggatagctactagaaatagtagataataccgaatacggtggcatatcttggaagtatgccaagaaaggagctaaggctccgctgagagatt

SEQ ID NO: 1659 - DNA, 225 bp, Unknown
  Encodes 16S rRNA from Parabacteroides
agagtttgatcctggctcaggatgaacgctagcgacaggcttaacacatgcaagtcgaggggcagcggggaggtagcaatacttccgccggcgaccggcgcactggtgagtaacacgtatgcaacctgcccccggttggggaataacccgcggaaacgcggactaatgccccgtatgcatggccgccgcatgacggccatgtgatagaacttcgtccggggatgg

SEQ ID NO: 1660 - DNA, 225 bp, Unknown
  Encodes 16S rRNA from Methylococcus
agagtttgatcatggctcagattgaacgctggcggcatgcctaacacatgcaagtcgaacgggagtaaggggcaactcttactctagtggcggacgggtgaggaatacgtaggaatctaccttagagtgggggataactcggggaaactcgagctaataccgcatatgttctacggagtaaagggggcgcaagctctcgctttaagatgagcctacgtcggatta

SEQ ID NO: 1661 - DNA, 225 bp, Unknown
  Encodes 16S rRNA from Enterorhabdus
agagtttgatcatggctcaggatgaacgctggcggcgtgcctaacacatgcaagtcgaacggtgaaaccgcctccgggcggacatgaagtggcgaacgggtgagtaacacgtgaccaacctgccccgcgcaccgggacagccccccgaaagggggattaataccggatactccggccgggccgcatggcccggccgggaaagctccggcggcgcgggatggggtc

SEQ ID NO: 1662 - DNA, 225 bp, Unknown
  Encodes 16S rRNA from Clostridium sensu stricto
agagtttgatcctggctcaggacgaacgctggcggcgtgcttaatacatgcaagtcgaacggatatgtagcaatacatattagtggcggacgggtgagtaacgcgtaatcaacctgccctttacaggggaataacacttggaaacaggtgctaataccgcatatgaccacaacacggcatcgtgaaggggtaaaagttttatcggtaaaggagggggttgcgtat

SEQ ID NO: 1663 - DNA, 225 bp, Unknown
  Encodes 16S rRNA from Gelidibacter
agagtttgatcctggctcaggataaacgctagcggcaggcctaacacatgcaagtcgagcggcagcgggatgtagcaatacattgccggcgagcggcggacgggtgagtaacgcgtatgcaacctgcccaccacacggagatagccgaccgaaaggacgattaaactccgatggcattgggacccggcatcgggatccaattaaatattcataggtggtggatgg

SEQ ID NO: 1664 - DNA, 225 bp, Unknown
  Encodes 16S rRNA from Sporobacter
agagtttgatcatggctcaggatgaacgctggcggcgtgcctaacacatgcaagtcgaacgaagcacaatggaaggagacttcggtcaacggaagttgtgacttagtggcggacgggtgagtaacgcgtgagcaacctgcctcagagtgggggacaacagctggaaacggctgctaataccgcataatactttcggaaggcatcttctgaaagtcaaagctttat

SEQ ID NO: 1665 - DNA, 225 bp, Unknown
  Encodes 16S rRNA from Pedobacter
agagtttgatcctggctcaggatgaacgctagcggcaggcctaatacatgcaagtcgtacggtaagcggtccttcgggactgcgagagtggcggacgggtgcgtaacgcgtatgcaaccaacccccctcgccgggatagccggtggaaacgccggataataccggatgcgccgcgtgggaggcatctcccgagcggcaaggcggagacgcggagggggacgggca

SEQ ID NO: 1666 - DNA, 225 bp, Unknown
  Encodes 16S rRNA from unknown taxa
agagtttgatcctggctcaggatgaacgctagctacaggcttaacacatgcaagtcgaacgagaaatacacttcggtgtatggaaagtggcggacgggtgagtaatgtgtagagaatctgccctgaagagggggacaacagagggaaacttctgctaataccccatatgcgcgtagttgagatactattcgtgaaagatttatcgcttcaggatgagtctgcatc

SEQ ID NO: 1667 - DNA, 225 bp, Unknown
  Encodes 16S rRNA from Syntrophococcus
agagtttgatcatggctcaggatgaacgctggcggcgtgcttaacacatgcaagtcgaacggacttgcccaccgaagcggaaggtgcttgcattcgaagcttcaccgggcaggttagtggcggacgggtgagtaacgcgtggggaacctgccccgtaccgggggataacagttagaaatgactgctaataccgcataagcgcacactgaggcatctcagagtgtg

SEQ ID NO: 1668 - DNA, 225 bp, Unknown
  Encodes 16S rRNA from Slackia
agagtttgatcctggctcaggatgaacgccggcggcgcgcctaacacatgcaagtcgagcggaggacccgccctcgggcgggcgatcagcggcgaacgggtgagtaacgcgtgggcaacctgccccccgcacgggaatagccccgggaaaccgggggtaatgcccgacggcccggcagaggggcatccctctgccggcgaagccatcgcggcgggggatgggccc

SEQ ID NO: 1669 - DNA, 225 bp, Unknown
  Encodes 16S rRNA from Mogibacterium
agagtttgatcctggctcaggatgaacgctggcggcgtgcctaacacatgcaagtcgagcgagaaatctatgtgatgaaacttcggtcgaatcttttagatggaaagcggcggacgggtgagtaacgcgtaggcaacctgcccttagcagggggatagccattggaaacgatgattaaaaccccataatacggatttatcacatgttgaatccgtcaaagattta

SEQ ID NO: 1670 - DNA, 225 bp, Unknown
  Encodes 16S rRNA from Prevotella
agagtttgatcatggctcaggatgaacgctagctacaggcttaacacatgcaagtcgaggggcagcacgtgggtagcaataccctgggtggcgaccggcgcacgggtgagtaacgcgtatccaacctggcccatagtagggaacagcccggcgaaagtcggattaatgccctatgttttcctcagtgagcattttatgaggaacaaagacttgtcgctatgggat

SEQ ID NO: 1671 - DNA, 225 bp, Unknown
  Encodes 16S rRNA from Pseudoflavonifractor
agagtttgatcatggctcaggacgaacgctggcggcgtgcttaacacatgcaagtcgagcggagatgaattgaatgagagcttcggcaggatttcgattgatcttagcggcggacgggtgagtaacgcgtgaacaatctgtcccacacagggggataacacttcgaaagaagtgctaataccgcataagaccacggtgccgcatggcacaggggtaaaagaaatt

SEQ ID NO: 1672 - DNA, 225 bp, Unknown
  Encodes 16S rRNA from Veillonella
agagtttgatcctggctcaggatgaacgctggcggcgtgcttaatacatgcaagtcgaacggatgattcggtctagcttgctagatcggagagtcagtggcgaacgggtgagtaatacgtaggcaacctgccccaaagcgggggatagcagttggaaacgactattaataccgcataggtaatctcgaggcatcttgagattattaaaggtgcgtttgcaccgct

SEQ ID NO: 1673 - DNA, 225 bp, Unknown
  Encodes 16S rRNA from Clostridium XlVa
agagtttgatcctggctcaggatgaacgctggcggcgtgcttaacacatgcaagtcgaacgaagcacttttccttgattcttcggatgaaaaggaaatttgactgagtggcggacgggtgagtaacgcgtgggtaacctgccctgtacagggggataacagttagaaatgactgctaataccgcataagaccacagcatcgcatggtgcaggggtaaaaactccg

SEQ ID NO: 1674 - DNA, 225 bp, Unknown
  Encodes 16S rRNA from Bacillus
agagtttgatcatggctcaggatgaacgctggcggcgtgcctaatacatgcaagtcgagcgaatggattaagagcttgctcttatgaagttagcggcggacgggtgagtaacacgtgggtaacctgcccataagactgggataactccgggaaaccggggctaataccggataacattttgaaccgcatggttcgaaattgaaaggcggcttcggctgtcactta

SEQ ID NO: 1675 - DNA, 225 bp, Unknown
  Encodes 16S rRNA from Pedobacter
agagtttgatcatggctcaggatgaacgctagcggcaggcctaatacatgcaagtcgaacggtaaacgccccttcgggggcgtgagagtggcggacgggtgcgtaacgcgtatgcaaccaacccccctcaccgggatagccggtggaaacgccggataagaccggatgcgccgctggggaggcatctccccggcggcaaggcggcgacgcggagggggacgggca

SEQ ID NO: 1676 - DNA, 225 bp, Unknown
  Encodes 16S rRNA from Clostridium IV
agagtttgatcatggctcaggatgaacgctggcggcgtgcctaacacattcaagtcgaacggagaagggagcttcggttcccggatcagtggcggacgggtgagtaacgcgtgagcaacctgccttcgtgtggggaataacacagggaaacttgtgctaataccgcataatgcaaagacgcagcattacgtttttgccaaagatttatcgcatgaagatgggctc

SEQ ID NO: 1677 - DNA, 225 bp, Unknown
  Encodes 16S rRNA from Fibrobacter
agagtttgatcatggctcagaacgaacgctggcggcgtgccttatacatgcaagtcgagcgagggcgcagcaatgcgaaccgagcggcgaacgggtgagtaacgcgtgaacaacctgccccaaagtccgggatagcccttccaacggaggattaataccggatggcgagggtttccgcatggagacctatccaaagtcttggcgctatgggaggggttcgcgtcc

SEQ ID NO: 1678 - DNA, 225 bp, Unknown
  Encodes 16S rRNA from Paenibacillus
agagtttgatcatggctcaggattaacgctggcaccatgcctaatacatgcatgtcgagcggagtttagagagcttgctttctaaacttagcggcaaatgggtgagtaacacgtaaggaacctgcctaagtgacgaggacaacggttggaaacgactgctaatactggatagtataagaaaccgcatgatttcttatttaaaggtccgtttggaccacgcttaga

SEQ ID NO: 1679 - DNA, 225 bp, Unknown
  Encodes 16S rRNA from Brevundimonas
agagtttgatcatggctcaggacgaacgctggcggtgtgcctcatacatgcaagtcgaacgataaggttccttcgggaatacataagtggcggacgggtgagtacaacataggaaatctgccctaaactgggggacaacagagggaaacttctgctaataccccatacgagataagttgaaatatttatcttgaaagctccggcggtttaggatgagcctgtgcc

SEQ ID NO: 1680 - DNA, 225 bp, Unknown
  Encodes 16S rRNA from Desulfovibrio
agagtttgatcctggctcagattgaacgctggcggcgtgcttaacacatgcaagtcgaacgcgaaaggggcttcggccccaagtagagtggcgcacgggtgagtaacgcgtggataatctgcccctgcaactggaatagcgactggaaacggtcgataataccggatacgcccttgttgtacaacgaggggaaaggagacctctgcttgcaagtttccgtgcagg

SEQ ID NO: 1681 - DNA, 225 bp, Unknown
  Encodes 16S rRNA from Clostridium XI
agagtttgatcctggctcaggacgaacgctggcggcgtgcctaacacatgcaagtcgagcggagacataaggaacggaggcttcggccgaagggagctatgttttagcggcggacgggtgagtaacgcgtgaacgatctgtcccttacagggggataacacatggaaacaggtgctaataccgcataagaccacagagctgcatggctcaggggtcaaaggagga

SEQ ID NO: 1682 - DNA, 225 bp, Unknown
  Encodes 16S rRNA from Helicobacter
agagtttgatcatggctcagagtgaacgctggcggcgtgcctaatacatgcaagtcgaacgatgaagcttttagcttgctagaagtggattagtggcgcacgggtgagtaatgcataggttatgtgccctttagtctgggatagccactggaaacggtgattaatactagatactccctacgggggaaagtttttcgctaaaggatcagcctatgtcctatcagc

SEQ ID NO: 1683 - DNA, 225 bp, Unknown
  Encodes 16S rRNA from Prevotella
agagtttgatcatggctcaggatgaacgctagctacaggcttaacacatgcaagtcgaggggcagcacgtgggtagcaataccctgggtggcgaccggcgcacgggtgagtaacgcgtatccaacctggcccatagtagggaacagcccggcgaaagtcggattaatgccctatgttttcctcagggagcattttatgaggaacaaagacttgtcgctatgggat

SEQ ID NO: 1684 - DNA, 225 bp, Unknown
  Encodes 16S rRNA from Clostridium XlVa
agagtttgatcctggctcaggatgaacgctggcggcgtgcctaacacatgcaagtcgaacggtgaaagaagactgaagccttcgggcggaagttttttggatcagtggcggacgggtgagtaacgcgtggataacctgcctcatacagggggataacagggagaaatcactgctaataccgcataagcgcacaggaccgcatggtctggtgtgaaaaacttcggt

SEQ ID NO: 1685 - DNA, 225 bp, Unknown
  Encodes 16S rRNA from Prevotella
agagtttgatcctggctcaggatgaacgctagcggcaggcttaacacatgcaagtcgaggggcagcgggttgtagcaatacaatgccggcgaccggcgtaagggtgagtaacgcgtgagcgacgtgcccgtcacagggggacaagcgctggaaacggcgtctgataccccataggaatgctccctgcatggggggtgtttgaaagatttatcggtgacggatcgg

SEQ ID NO: 1686 - DNA, 225 bp, Unknown
  Encodes 16S rRNA from Herbiconiux
agagtttgatcctggctcaggatgaacgctggcggcgtgcttaacacatgcaagtcgaacggtgaaagcgggagcttgctcctgctggatcagtggcgaacgggtgagtaacacgtgagtaacctgcccttgactctgggataagcgttggaaacgacgtctaataccggatacgaccttcggaggcatctcctggaggtggaaagaatttcggtcaaggatgga

SEQ ID NO: 1687 - DNA, 225 bp, Unknown
  Encodes 16S rRNA from Clostridium IV
agagtttgatcatggctcaggacgaacgctggcggcgtgcctaacacattcaagtcgaacggtgaaggaagcttgcttccggatcagtggcggacgggtgagtaacgcgtgagcaacctgccctgcattgggggataacacagggaaacttgtgctaatacctcatgacacatacttaccgcatgataggtatgtcaaagagcaatcgatgcaggatgggctcgc

SEQ ID NO: 1688 - DNA, 225 bp, Unknown
  Encodes 16S rRNA from Rikenella
agagtttgatcatggctcaggatgaacgctagcggcaggcttaacacatgcaagtcgaggggcagcgcgtggtagcaataccatggcggcgaccggcgcacgggtgcgtaacgcgtatgcaacctgcctgtaacagggggataacccggagaaatttggactaataccgcatattgccgagctgcagcattgcaattcggcgaaaggagcgatccggttacagat

SEQ ID NO: 1689 - DNA, 225 bp, Unknown
  Encodes 16S rRNA from Clostridium XlVa
agagtttgatcatggctcaggatgaacgctggcggcgtgcctaacacatgcaagtcgaacggggtacagacgctgcgagaggaagtgcttgcacggaatcaaacttgtttgtacttagtggcggacgggtgagtaacgcgtggaaaacctgcctcatacagggggataacaggaagaaattcctgctaataccgcatgagcgcacattaccgcatggtagagtgt

SEQ ID NO: 1690 - DNA, 225 bp, Unknown
  Encodes 16S rRNA from Hippea
agagtttgatcctggctcagagttaacgctggcggcgtgcctaacacatgcaagtcgagcgaattcttacagagcatcgtaagagttagcggcaaacgggtgagtaacacatgggaaacctcccttagaatggggaatatctccgtgaaaacggagctaataccgcataagaccacagtttggcatcaaacaggggtaaaagcagcaatgcgttctaagatggtc

SEQ ID NO: 1691 - DNA, 225 bp, Unknown
  Encodes 16S rRNA from Lactobacillus
agagtttgatcctggctcaggacgaacgctggcggcatgcctaatacatgcaagtcgaacgaaccaaactgaagattgatgcttgcatcatgattcagaccttggtgagtggcggacgggtgagtaacacgtgggtaacctgcccaaaagtgggggataacatttggaaacaagtgctaataccgcataacaactactttcacatgatcgtagcttgaaagatgg

SEQ ID NO: 1692 - DNA, 225 bp, Unknown
  Encodes 16S rRNA from Eubacterium
agagtttgatcatggctcaggacgaacgctggcggcgtgcttaacacatgcaagtcgaacgaagcttgattttagatttcttcggaatgataaatgatatgactgagtggcggacgggtgagtaacgcgtgagcaacctgcccttcggagggggatagcgtttggaaacgaacggtaataccgcataatgttaacggaaggcatcttctgttaaccaaaactccg

SEQ ID NO: 1693 - DNA, 225 bp, Unknown
  Encodes 16S rRNA from Clostridium IV
agagtttgatcatggctcaggacgaacgctggcggcgtgcctaacacatgcaagtcgaacggggctgaagatggcacaggctcacctggggagtcaggtgggcgcgtgtcgtcttcagcttagtggcggacgggtgagtaacgcgtgagcgacctgacccatacagggggacaacagctggaaacggctgctaataccgcataagaccacgtacctgagggtatg

SEQ ID NO: 1694 - DNA, 225 bp, Unknown
  Encodes 16S rRNA from Clostridium III
agagtttgatcctggctcaggacgaacgctggcggcgtgcctaacacatgcaagtcgaacgagaaatatggaaatgattccttcggggagaatggaaatatggacagtggcggacgggcgagtaacgcgtgagtaacctgcccataagcgggggatagccgatggaaacgtcgagtaataccccatgacataattgagtcgcatggcttaattatcaaagattta

SEQ ID NO: 1695 - DNA, 225 bp, Unknown
  Encodes 16S rRNA from Lactobacillus
agagtttgatcatggctcaggacgaacgctggcggcatgcctaatacatgcaagtcgaacgaaccatcctgaagattgaagcttgcttcatgattcagatcttggtgagtggcggacgggtgagtaacacgtgggtaacctgcccaaaagtgggggataacatttggaaacaagtgctaataccgcataacaactactttcgcatgatcgtagtttaaaagatgg

SEQ ID NO: 1696 - DNA, 225 bp, Unknown
  Encodes 16S rRNA from Lactobacillus
agagtttgatcatggctcaggacgaacgctggcggcgtgcctaatacatgcaagtcgagcgagcagaaccagcagatttacttcggtaatgacgctggggacgcgagcggcggatgggtgagtaacacgtggggaacctgccccatagtctgggataccacttggaaacaggtgctaataccggataagaaagcagatcgcatgatcagcttataaaaggcggcg

SEQ ID NO: 1697 - DNA, 225 bp, Unknown
  Encodes 16S rRNA from Desulfotomaculum
agagtttgatcctggctcaggacgaacgctggcggcgtgcttaatacatgcaagtcgaacggagatattccgccgttcaaggtttcggctgagaacatgggatatcttagtggcgaacgggtgagtaacgcgtgaacaacctgactcaaagagggggataacaacgggaaactgttgctaataccgcataagaccacgccctcgcatgggggaggggtaaaagat

SEQ ID NO: 1698 - DNA, 225 bp, Unknown
  Encodes 16S rRNA from Prevotella
agagtttgatcatggatggggatgcgtaggattaggcagtcggcggggtaacggcccaccgagccgacgatccttaggggttctgagaggaaggtcccccacactggtactgagacacggaccagactcctacgggaggcagcagtgaggaatattggtcaatggtcggaagactgaaccagccaagtagcgtgcaggatgacggccctacgggttgtaaactgc

SEQ ID NO: 1699 - DNA, 225 bp, Unknown
  Encodes 16S rRNA from Staphylococcus
agagtttgatcatggctcaggatgaacgctggcggcgtgcctaatacatgcaagtcgagcgaacagacgaggagcttgctcctttgacgttagcggcggacgggtgagtaacacgtgggtaacctacctataagactgggataacttcgggaaaccggagctaataccggataatatttcgaaccgcatggttcgatagtgaaagatggctctgctatcacttat

SEQ ID NO: 1700 - DNA, 225 bp, Unknown
  Encodes 16S rRNA from Tenacibaculum
agagtttgatcctggctcaggatgaacgctagcggcaggcttaacacatgcaagtcgaggggtaacaggcggtagcaatactgtgctgacgaccggcgcacgggtgcgtaacgcgtatgcaacctgcccgcgacagggggataacggagggaaacttccactaatatcccatggtgccggggtctcgcatggggccgcggctaaaggggcgacccggttgcggat

SEQ ID NO: 1701 - DNA, 225 bp, Unknown
  Encodes 16S rRNA from Parabacteroides
agagtttgatcctggctcaggatgaacgctagcgacaggcttaacacatgcaagtcgaggggcagcggggcgtggcaacacgccgccggcgaccggcgcactggtgagtaacacgtatgcaacctgcccatcggagggggataacccgtggaaacgcggcctaataccccgtacgcctttggatcgcatgatttggaggtgaaaggaggcgactctgtcgatgga

SEQ ID NO: 1702 - DNA, 225 bp, Unknown
  Encodes 16S rRNA from Clostridium XlVa
agagtttgatcatggctcaggacgaacgctggcggcgtgcctaacacatgcaagtcgaacggagacgaggcataagcttcccttcggggaagccgtttcgtcttagtggcggacgggtgagtaacgcgtggacaacctgccgtatgctgggggacaacagcgggaaactgctgctaataccgcataagccggggagggggcatccccatcccgggaaagatttat

SEQ ID NO: 1703 - DNA, 225 bp, Unknown
  Encodes 16S rRNA from Clostridium IV
agagtttgatcatggctcaggatgaacgctggcggcgtgcataacacattcaagtcgaacggacttagaggggcttgctcctcgaaagttagtggcggacgggtgagtaacgcgtgagcaacctgcctttttccgggggataacatcgggaaaccggtgctaataccgcataacgtacaggaaccgcatgatttttgtaccaaagattcattgggaaaagatggg

SEQ ID NO: 1704 - DNA, 225 bp, Unknown
  Encodes 16S rRNA from Clostridium IV
agagtttgatcatggctcaggacgaacgctggcggcgtgcctaacacatgcaagtcgaacggacttagctggatgcttgcatccggcgacagttagtggcggacgggtgagtaacgcgtgaataacctgcccaacagagggggataacgtttggaaacgaacgctaataccgcataatattatgatatcgcatggtattataatcaaaggagcaatccgctgatg

SEQ ID NO: 1705 - DNA, 225 bp, Unknown
  Encodes 16S rRNA from Pedobacter
agagtttgatcatggctcaggatgaacgctagcggcaggcctaatacatgcaagtcggacggtaagtgccctttcgggggcacgagagtggcggacgggtgcgtaacgcgtatgcaaccaacccccgtcttccggatagccggtggaaacgccggataatacggaatgaacccgaggaggggcatcccttcgcgggcaaggcggcgacgcggacggggacgggca

SEQ ID NO: 1706 - DNA, 225 bp, Unknown
  Encodes 16S rRNA from Helicobacter
agagtttgatcatggctcagagtgaacgctggcggcgtgcctaacacatgcaagtcgcgcgggactttacagagtatcgtaaagtctagcggcaaacgggtgagtaacacgtgggaaacctccctcagaatggggaatatctccgggaaaccggagtcaataccgcataagaccacagtttggcatcaaacaggggtcaaagcagtaatgcgttttgagatggtc

SEQ ID NO: 1707 - DNA, 225 bp, Unknown
  Encodes 16S rRNA from Proteiniclasticum
agagtttgatcatggctcaggacgaacgctggcggcgtgcctaacacatgcaagtcgagcggggacataattggaaaggcttcggcccggaaggttatgttccagcggcggacgggtgagtaacgcgtgaacaatctgtcccagacaggggaataacagatggaaacatctgctaataccgcataagaccacgacccgacatcgggatgaggtaaaaggagcaat

SEQ ID NO: 1708 - DNA, 225 bp, Unknown
  Encodes 16S rRNA from Anaplasma
agagtttgatcctggctcagaacgaacgctggcagtatgctttaaccatgcaagtcgaacgagaaagtgtagcaatatatgagtaaagtggcaaacgggtgagtaacacacaggaatctacccagtagagaggaataagcactagaaatggtgtctaatacctcataagccaatatagtaaaatatattgggaaaggattagtagtaatattaattcactattgg

SEQ ID NO: 1709 - DNA, 225 bp, Unknown
  Encodes 16S rRNA from Bacteroides
agagtttgatcatggctcaggatgaacgctagctacaggcttaacacatgcaagtcgaggggcatcatggggttggtttcggccgatcctgatggcgaccggcggatgggtgagtaacgcgtatccaacctgcccctgtcccgcggacagcccttagaaatgaggattaacccgcgatgttgcccctttgccgcatggtattggggtgaaatttttaaggacggg

SEQ ID NO: 1710 - DNA, 225 bp, Unknown
  Encodes 16S rRNA from Clostridium IV
agagtttgatcatggctcaggacgaacgctggcggcgtgcctaacacatgcaagtcgaacggagtattccgcccgagaccagatgtagcttgctacggatgggatcaatagggatacttagtggcggacgggtgagtaacgcgtgaataacctgcccaacagagggggataacgtttggaaacgaacgctaataccgcataacattacggtatcgcatggtacag

SEQ ID NO: 1711 - DNA, 225 bp, Unknown
  Encodes 16S rRNA from Mucilaginibacter
agagtttgatcatggctcaggatgaacgctagcggcaggcctaatacatgcaagtcgaacgggattgcctccttcgggaggcatgagagtggcgcacgggtgcgcaacgcgtatgcaaccaacccccgacaggcggatagccggtggaaacgccggataatacgccatggttccggtggagggcatcctctactggataaagccgagaggcggtcggggacgggc

SEQ ID NO: 1712 - DNA, 225 bp, Unknown
  Encodes 16S rRNA from unknown taxa
agagtttgatcatggctcagaacgaacgctggtagcgtggattaggcatgcaagtcgaacgggatccgggaggtagcaatacttcctggtgagagtggcggattggggaggaacacgtgagcaacctgcccttgagttggggaaaaccgttggaaacgacggctaataccggatgcggcgccccgtgacatcgcgggagcgctaaagggggccgcaaggctcccg

SEQ ID NO: 1713 - DNA, 225 bp, Unknown
  Encodes 16S rRNA from Selenomonas
agagtttgatcctggctcaggacgaacgctggcggcgtgcttaacacatgcaagtcgaacggggcgattgagagcttgctcttgaaagcctagtggcaaacgggtgagtaacgcgtaggcaacctgcctccaagatggggacaacagtccgaaaggactgctaataccgaatgttgtaccttaaccgcatggtgaaggtattaaagatggcctctatatataagc

SEQ ID NO: 1714 - DNA, 225 bp, Unknown
  Encodes 16S rRNA from Parabacteroides
agagtttacatggctcaggatgaacgctagcgacaggcctaacacatgcaagtcgcggggcagcattgaggtagcaatacttcagatggcgaccggcgcacgggtgcgtaacgcgtatccaacctggcccttactcgggtatagccctgcgaaagtaggattaatccccgatgttgtcaagatggagccttttttcttgaccaaaggcattagtcggtaagggat

SEQ ID NO: 1715 - DNA, 225 bp, Unknown
  Encodes 16S rRNA from Eubacterium
agagtttgatcatggctcaggatgaacgctggcggcgtgcctaacacatgcaagtcgagcgagatatccatgacgaattcttcggatgcctgaatggatggaaagcggcggacgggtgagtaacgcgtaggtaacctgccctgtacaaagggatagccactggaaacggtgattaataccttatgacaccgcagcatcccatggtgaagcggtcaaagattttat

SEQ ID NO: 1716 - DNA, 225 bp, Unknown
  Encodes 16S rRNA from Coprococcus
agagtttgatcatggctcaggatgaacgctggcggcgtgcttaacacatgcaagtcgaacgaagcacctcaaccgaagaagagaccagcttgctggtattggattcacccgaggtgacttagtggcgaacgggtgagtaacgcgtgggtaacctacctcttacagggggataacaattagaaatgattgctaataccgcataacactttagagccgcatggctca

SEQ ID NO: 1717 - DNA, 225 bp, Unknown
  Encodes 16S rRNA from Weissella
agagtttgatcatggctcaggatgaacgctggcggcgtgcctaatacatgcaagtcgaacgctttgtttttaattgatatgaagagcttgctctgatttgattttatctgacaaagagtggcgaacgggtgagtaacacgtgggtaacctacctcttagcaggggataacatttggaaacaagtgctaataccgtataacactaacaaccgcatggttgttagtt

SEQ ID NO: 1718 - DNA, 225 bp, Unknown
  Encodes 16S rRNA from Pedobacter
agagtttgatcatggctcaggatgaacgctagcggcaggcctaatacatgcaagtcgtacggtaaaatcctcttcgggggattgagagtggcggacgggtgcgtaacgcgtatgcaaccaacccccctcgccgggatagccggtggaaacgccggataataccggatgcgccgcgtgggaggcatctcccgtgcggcaaggcggagacgcggagggggacgggca

SEQ ID NO: 1719 - DNA, 225 bp, Unknown
  Encodes 16S rRNA from Clostridium XI
agagtttgatcatggctcaggacgaacgctggcggcgtgcctaacacatgcaagtcgagcggggacatacggaacgagggattcgtcccgagggaaatatgtttcagcggcggacgggtgagtaacgcgtgaacgatctgtccctgacagggggataacacatggaaacaggtgctaataccgcataagaccacagcgctgcatggcgcaggggtcaaaggagag

SEQ ID NO: 1720 - DNA, 225 bp, Unknown
  Encodes 16S rRNA from Sphingomonas
agagtttgatcctggctcagaaggaacgctagctatatgcttaacacatgcaagtcgaacgttgttttcggggagctgggcagaaggaaaagaggctcctagcgtgaaggttgcttgtctcgcccaggaggtgggaacagttgaaaacaaagtggcgaacgggtgcgtaatgcgtgggaatctgccgaacagttcgggccaaatcctgaagaaagctaaaaagcg

SEQ ID NO: 1721 - DNA, 225 bp, Unknown; identical to SEQ ID NO: 789
  Encodes 16S rRNA from Treponema

SEQ ID NO: 1722 - DNA, 225 bp, Unknown
  Encodes 16S rRNA from Geobacter
agagtttgatcatggctcagaacgaacgctggcggcaggcctaacacatgcaagtcgaacgtgaaaggggcttcggccctgagtaaagtggcgcacgggtgagtaacacgtgaataatctgcccttatgtctgggatagcagaccgaaaggactggtaaccccggataagcttccgcaccaaccgggtgagtggagaaaaatacgggatcgcaagaccgtatgca

SEQ ID NO: 1723 - DNA, 225 bp, Unknown
  Encodes 16S rRNA from Clostridium XlVa
agagtttgatcatggctcaggatgaacgctggcggcgtgcttaacacatgcaagtcgaacgaagatatatcagcagaggccttcgggcggatgcagatatatacttagtggcggacgggtgagtaacgcgtggagaacctgccgtatgcagggggacaacacctggaaacgggtgctaataccgcataagcgcacgtgatagcattatcgagtgtgaaaagctta

SEQ ID NO: 1724 - DNA, 225 bp, Unknown
  Encodes 16S rRNA from Filomicrobium
agagtttgatcatggctcagagcgaacgctagcggaatgctttatacatgcaagtcgaacgaacgagtttatattgagtagcaatacgatttataaatgagttagtggcaaacgggtgagtaatagttaggaacttgccgaatagtgggggacaacagatagaaatgtctgctaataccgcatattcccgagaggggaaagatttattgctatttgagaggccta

SEQ ID NO: 1725 - DNA, 225 bp, Unknown
  Encodes 16S rRNA from Prevotella
agagtttgatcatggctcaggatgaacgctagctacaggcttaacacatgcaagtcgaggggaaacgacagagagtgcttgcactttttgggcgtcgaccggcgaatgggtgagtaacgcgtatccaacctgcccttgactgagggatagcccagtgaaaactgaattaatacctcatatcctcctccgacggcatcagacgaggagtaaagatttatcggtcaa

SEQ ID NO: 1726 - DNA, 225 bp, Unknown
  Encodes 16S rRNA from Pedobacter
agagtttgatcatggctcaggatgaacgctagcggcaggcctaatacatgcaagtcggacggtaagtgccctttcgggggcacgagagtggcggacgggtgcgtaacgcgtatgcaaccaacccccgtcttccggatagccggtggaaacgccggataatacggaatgaaccctttggggggcatcccctggagggcaaggcggcgacgcggacggggacgggca

SEQ ID NO: 1727 - DNA, 225 bp, Unknown
  Encodes 16S rRNA from Pedobacter
agagtttgatcatggctcaggatgaacgctagcggcaggcctaatacatgcaagtcggacggtaagcgccccttcgggggcgcgagagtggcgcacgggtgcgtaacgcgtatgcaaccagccccgtccaggcggatagccggtggaaacgccggataatacgccacggtcccggaggggggcatccctttccgggtgaagcggagacgcgggacgggacgggca

SEQ ID NO: 1728 - DNA, 225 bp, Unknown
  Encodes 16S rRNA from Clostridium XlVa
agagtttgatcatggctcaggatgaacgctggcggcgtgcctaacacatgcaagtcgaacgaagaccccgaggcagagatttcggtcgaagccaagggaggactgagtggcggacgggtgagtaacgcgtggataacctgccccatacagggggatagcagttggaaacgactgataataccgcataagcgcacggggagacatctcctagtgtgaaaagagata

SEQ ID NO: 1729 - DNA, 225 bp, Unknown
  Encodes 16S rRNA from Bifidobacterium
agagtttgatcatggctcaggatgaacgctggcggcgtgcttaacacatgcaagtcgaacgggatcggctggagcttgctccggccgtgagagtggcgaacgggtgagtaatgcgtgaccgacctgccccatacaccggaatagctcctggaaacgggtggtaatgccggatgctccagttggatgcatgtccttctgggaaagattctatcggtatgggatggg

SEQ ID NO: 1730 - DNA, 225 bp, Unknown
  Encodes 16S rRNA from Saccharofermentans
agagtttgatcatggctcaggatgaacgctggcggcgtgcctaacacatgcaagtcgaacgaaaaactttcaccgaatgaaagatgaagattcatcagattctggatttcaccgaaagtttttagtggcggacgggtgagtaatacgtagataatctgccttctagagggaaataacagagagaaatttctgctaatgtcccataagaccacactatggcatctt

SEQ ID NO: 1731 - DNA, 225 bp, Unknown
  Encodes 16S rRNA from Ruminococcus
agagtttgatcctggctcaggacgaacgctggcggcacgcttaacacatgcaagtcgaacggagtataggagcttgcttttatacttagtggcggacgggtgagtaacacgtgagcaacctgcctttcggagaggaataatgattggaaacggtcactaatacctcataaaatatatttatcgcatggtgagtatatcaaagatttatcgccgagagatgggctc

SEQ ID NO: 1732 - DNA, 225 bp, Unknown
  Encodes 16S rRNA from Flavobacterium
agagtttgatcatggctcaggatgaacgctagcgacaggcctaacacatgcaagtcgaggggcagcgggaggtggcaacaccttgccggcgaccggcgcacgggtgcgtaacgcgtatgcaacctgtccgggacagtgggacagccccccgaaagggggattaataccgcatggctcttcaggaccgcatggtcttgaaggtaaacattcatgggtcccggctgg

SEQ ID NO: 1733 - DNA, 225 bp, Unknown
  Encodes 16S rRNA from Rhodopirellula
agagtttgatcctggctcagaatgaacgttggcggcgtggattaggcatgcaagtcgagcgggagtagcaatactccagcggcgaaagggatagtaacgcgtagttaccaacccccgggactgggatagcttttggaaacgaaaggtaataccagataacatctccggatcaaaggtgagattccgcctggggacgggactgcgtcctattagttagttggtgag

SEQ ID NO: 1734 - DNA, 225 bp, Unknown
  Encodes 16S rRNA from Roseburia
agagtttgatcctggctcaggagaaacgctggcggcgcacataagacatgcaagtcgaacggaatccagccaaatgtttaccatgaggcgaagatttagtggcggacgggtgagtaacacgtgagcaacctaccttcaggagggggataacattgagaaatcagtgctaataccgcataatactatgagaagacatcttcacatagtcaaaggatttccgcctaa

SEQ ID NO: 1735 - DNA, 225 bp, Unknown
  Encodes 16S rRNA from Prevotella
agagtttgatcatggctcaggacgaacgctggcggcacgcttaacacatgcaagtcgaggggcatcaggacggtagcttgctatcgttgctggcgaccggcgcacgggtgagtaacgcgtatccaaccttcccatgactccggttcagcccgccgaaaggcggattactcccggatggtttccgaagagggcatctgatttggaataaagattgatcggtcatgg

SEQ ID NO: 1736 - DNA, 225 bp, Unknown
  Encodes 16S rRNA from Limibacter
agagtttgatcatggctcaggatgaacgctagcggcaggcctaatacatgcaagtcgtacggtaagcgccccttcgggggtgcgagagtggcggacgggtgcgtaacgcgtatgcaaccaacccccctcgccgggatagccggtggaaacgccggataataccggatgcgccgcaggggaggcatcttcccggcggcaaggcggagacgcggagggggacgggca

SEQ ID NO: 1737 - DNA, 225 bp, Unknown
  Encodes 16S rRNA from Saccharofermentans
agagtttgatcatggctcaggacgaacgctggcggcgtgcctaacacatgcaagtcgagcgaggacaacggcttcggtcgttgttcgagcggcggacgggtgagtaacgcgtgaacaatctgtccctgacagggggataacacttggaaacaggtgctaataccgcataagaccacaggaccgcatggttcaggggtcaaaggagcaatccggtgaggggtgagt

SEQ ID NO: 1738 - DNA, 225 bp, Unknown
  Encodes 16S rRNA from Clostridium sensu stricto
agagtttgatcatggctcaggacgaacgctggcggcgtgcttaacacatgcaagtcgaacgaggtgtagcaatacaccgagtggcggacgggtgagtaacgcgtgagcaacctgcccttgtcaggggaataacacagagaaatctgtgctaataccgcatgacgttgaatcaaggcatcttgaatcaaccaaagcgaataagcggacaaggatgggctcgcgtcc

SEQ ID NO: 1739 - DNA, 225 bp, Unknown
  Encodes 16S rRNA from Clostridium III
agagtttgatcatggctcaggatgaacgctggcggcgcacataagacatgcaagtcgaacgaacttaggctctttcttttagttagagtacggttagtggcggactggtgagtaatgtataagcaacctgcctatcagaggggaataacagtgagaaatcattgctaataccgcatatgctaacagaatcgcatgatttagttaggaaaggagtaatccgctgat

SEQ ID NO: 1740 - DNA, 225 bp, Unknown
  Encodes 16S rRNA from Prevotella
agagtttgatcatggctcaggatgaacgctagctacaggcttaacacatgcaagtcgaggggcagcgggggcttagcttgctaagcttgccggcgaccggcgcacgggtgagtaacgcgtatccaaccttcccgcaggtagggaacagcccggcgaaagtcggattaatgccctatgaattcctttgatggcatctgatgaggaataaagatttatcgcctgcgg

SEQ ID NO: 1741 - DNA, 225 bp, Unknown
  Encodes 16S rRNA from Pseudoxanthomonas
agagtttgatcatggctcagagtgaacgctggcggtaggcctaacacatgcaagtcgaacggcagcacaggagagcttgctctctgggtggcgagtggcggacgggtgaggaatacatcggaatctactctgtcgtgggggataacgtagggaaacttacgctaataccgcatacgacctacgggtgaaagtgggggaccgcaaggcctcacgcgatagaatgag

SEQ ID NO: 1742 - DNA, 225 bp, Unknown
  Encodes 16S rRNA from Anaerorhabdus
agagtttgatcctggctcaggatgaacgctggcggcgtgcttaatacatgcaagtcgaacggacgctctgacaagcttgcttgaaagagtagtgcgtggcgaacgggtgagtaatacataggcaacctgccccgatgagcgggataaccaatggaaacgttggataataccgcataggtaatccgaaggcatctttggattattaaagtcgcgtttgcggcactt

SEQ ID NO: 1743 - DNA, 225 bp, Unknown
  Encodes 16S rRNA from Clostridium III
agagtttgatcatggctcaggacgaacgctggcggcgtgcctaacacatgcaagtcgaacgagaaatgatgatttgattccttcgggatgaaaagattcatggacagtggcggacgggcgagtaacgcgtgagtaacctgcccataagagagggatagccgatggaaacgtcgagtaatacctcatattgtaatttgatcgcatgattgaattatgaaagattta

SEQ ID NO: 1744 - DNA, 225 bp, Unknown
  Encodes 16S rRNA from Streptomyces
agagtttgatcctggctcaggacgaacgctggcggcgtgcttaacacatgcaagtcgaacgatgaaccggcttcggccggggattagtggcgaacgggtgagtaacacgtgggcaatctgccctgcactctgggacaagccctggaaacggggtctaataccggatacgaccgtttgaggcatctcatggcggtggaaagctccggcggtgcaggatgagcccgc

SEQ ID NO: 1745 - DNA, 225 bp, Unknown
  Encodes 16S rRNA from Pedobacter
agagtttgatcatggctcaggatgaacgctagcggcaggcctaatacatgcaagtcgaacggtaaatgtcccttcggggacatgagagtggcggacgggtgcgtaacgcgtatgcaaccaacccccctcaccgggatagccggtggaaacgccggataagaccggatgcgccggcggggaggcatctccctgtcggcaaggcggcgacgcggagggggacgggca

SEQ ID NO: 1746 - DNA, 225 bp, Unknown
  Encodes 16S rRNA from Cellulomonas
agagtttgatcatggctcaggacgaacgctggcggcgtgcttaacacatgcaagtcgaacggtgaagaccagcttgctggttggatcagtggcgaacgggtgagtaacacgtgagcaacctgcccttcactctgggataagccttggaaacggggtctaataccggatatgacgtccctacgcatgtgggggtgtggaaagatttatcggtgggggatgggctcg

SEQ ID NO: 1747 - DNA, 225 bp, Unknown
  Encodes 16S rRNA from Clostridium XlVa
agagtttgatcatggctcaggatgaacgctggcggcgtgcctaacacatgcaagtcgaacgaagcatgttggaaagagtccttcgggacgatggaagacatgacttagtggcggacgggtgagtaacgcgtgggcaacctgccgtacacagggggacaacagctggaaacggctgctaataccgcataagcgcacagctttgcatgaagcagtgtgaaaagcgca

SEQ ID NO: 1748 - DNA, 225 bp, Unknown
  Encodes 16S rRNA from Olivibacter
agagtttgatcatggctcaggatgaacgctagcggcaggcctaatacatgcaagtcgtacggtaaacggtccttcgggaccgtgagagtggcggacgggtgcgtaacgcgtatgcaaccaacccccctcgccgggatagccggtggaaacgccggataataccggatgcgccgcgtgggaggcatctcccgtgcggcaaggcggagacgcggagggggacgggca

SEQ ID NO: 1749 - DNA, 225 bp, Unknown
  Encodes 16S rRNA from Treponema
agagtttgatcctggctcagaacgaacgctggcggcgcgtcttaagcatgcaagtcgagcggcaagttggtgcttgcaccaacccagagcggcggactggtgagtaacgcgtgggtgacgcaccctccggacggggacagcccgtggaaacacggggtaataccggatacggcggcatgggctggagccatgccgggaaaggagcttcggctccgccgggggagc

SEQ ID NO: 1750 - DNA, 225 bp, Unknown
  Encodes 16S rRNA from Gelidibacter
agagtttgatcatggctcaggataaacgctagcggcaggcctaacacatgcaagtcgagcggcagcgggatgtagcaatacattgccggcgagcggcggacgggtgagtaacgcgtatgcaacctgcccaccacacggagatagccgaccgaaaggacgattaaactccgatggcattgggagccggcatcggcatccaattaaatatttataggtggtggatgg

SEQ ID NO: 1751 - DNA, 225 bp, Unknown
  Encodes 16S rRNA from Ruminococcus
agagtttcatcctggctcaggatgaacgctagctacaggcttaacacatgcaagtcgaacggagaatgcttagcttgctttgcgttcttagtggcggacgggtgagtaacacgtgagcaacctgccttttggcgagggatagcttctggaaacggatggtaatacctcataaatatagctgaatcgcatgatttagttatcaaagaatttcgccaaaagatgggc

SEQ ID NO: 1752 - DNA, 225 bp, Unknown
  Encodes 16S rRNA from Clostridium IV
agagtttgatcatggctcaggacgaacgctggcggcgtgcttaacacatgcaagtcgaacgagaatctgtggaaggagttttcggacaacggaaacagaggaaagtggcggacgggtgagtaacgcgtgaggaacctgccttggagagggggacaacagctggaaacggctgctaataccgcatgatgcgtgagggagacatctcccacacgccaaagatttatc

SEQ ID NO: 1753 - DNA, 225 bp, Unknown
  Encodes 16S rRNA from Gemmatimonas
agagtttgatcctggctcaggacgaacgctggcggcgtgcttaacacatgcaagtcacgggggcccgcaagggtaaccggcgaacgggtgcgtaacacgtgagcaatctgccgtacactgggggatagccggcccaacggccgggtaataccgcatacgttccctgtctggcatcggatggggaggaaacctccgggggtgtacgaggagctcgcggcctatcag

SEQ ID NO: 1754 - DNA, 225 bp, Unknown
  Encodes 16S rRNA from Prevotella
agagtttgatcatggctcaggatgaacgctagctacaggcttaacacatgcaagtcgaggggcagcatgaaggaagcttgcttcctttgatggcgaccggcgcacgggtgagtaacgcgtatccaaccttcccttaacttgggaatagcccggtgaaaaccggattaatgcccgatgtggtccagcgagggcatctgacccggaccaaagattttttcggttaag

SEQ ID NO: 1755 - DNA, 225 bp, Unknown
  Encodes 16S rRNA from Ethanoligenens
agagtttgatcatggctcaggacgaacgctggcggcatgcctaacacatgcaagtcgaacggagcaaagagggcttgccctttttgcttagtggcggacgggcgagtaacgcgtgagcaacctgcccctcagaggggaataacgtccggaaacggacgctaataccgcataacgcagcgggaccgcatggttctgctgccaaaggagcaatccgctgagggatgg

SEQ ID NO: 1756 - DNA, 225 bp, Unknown
  Encodes 16S rRNA from Leucobacter
agagtttgatcatggctcaggacgaacgctggcggcgtgcttaacacatgcaagtcgaacgatgaagcccagcttgctgggtggaagagtggcgaacgggtgagtaacacgtgagtaacctgcccctgactctgggataagcgctggaaacggcgtctaatactggatatgagcaatggccgcatggtctgttgttggaaagatttatcggttggggatggactc

SEQ ID NO: 1757 - DNA, 184 bp, Unknown
  Encodes 16S rRNA from Clostridium XlVa
agagtttgatcctggctcaggataaacgctggcggcgtgctttgcacaatgggggaaaccctgatgcagcgacaccgcgtgagcgatgaaatatttcggtatgtaaagctctatcagcagggaagataatgacggtacctgactaagaagcaccggctaaatacgtgccagcagccgcggtaat

SEQ ID NO: 1758 - DNA, 225 bp, Unknown
  Encodes 16S rRNA from Clostridium XlVa
agagtttgatcctggctcaggatgaacgctggcggcgtgcctaatacatgcaagtcgagcgaagcgcctgcttctgatctttcgggtgaagaaacaggcgactgagcggcggacgggtgagtaacacgtagggaacctgcctcacacagggggataacagttagaaatgactgctaataccgcataagcgcacaggaccgcatggtctggtgtgaaaagctccgg

SEQ ID NO: 1759 - DNA, 225 bp, Unknown
  Encodes 16S rRNA from Eggerthella
agagtttgatcctggctcaggatgaacgctggcggcgtgcttaacacatgcaagtcgaacgattaacccatcttcggatggttatagagtggcgaacgggtgagtaacacgtgatcaacctacctttcactttgggataactacgggaaactgtagctaataccaaatactcctggggttccgcatggcgccctagggaaagttccggcggtgaaagatgggatc

SEQ ID NO: 1760 - DNA, 225 bp, Unknown
  Encodes 16S rRNA from Prevotella
agatttgatcatggctcaggatgaacgctagctacaggcttaacacatgcaagtcgaggggtaacggcagtgaagcttgctttactggccgacgaccggcgcacgggtgagtaacgcgtatccaacctgcccatgactcagggataaccttccgaaagggagcctaatacctgatgttgtgagacgagggcatctgagtgtcaccaaagattcatcggtcatgga

SEQ ID NO: 1761 - DNA, 225 bp, Unknown
  Encodes 16S rRNA from Prevotella
agagtttgatcatggctcaggatgaacgctagctacaggcttaacacatgcaagtcgaggggcagcatgggagttgcttgcaacttctgatggcgaccggcgcacgggtgagtaacgcgtatccgaccttccctcaggtagggaacagcccggcgaaagtcggattaatgccctatagtctgcgaattgcgcatgttgtttgcagtaaagatttatcgcctgggg

SEQ ID NO: 1762 - DNA, 225 bp, Unknown
  Encodes 16S rRNA from Solobacterium
agagtttgatcatggctcaggataaacgctggcggcgtgcctaatacatgcaagtcgaacgatgaagttctcaagcttgcttgagaatagattagtggcgaacgggtgagtaatacataagcaacctacccatgaagactgggataatctctggaaacggggactaataccggataggtaagcggaccgcatgatctgcttattaaaggttaaaaacactgatgg

SEQ ID NO: 1763 - DNA, 225 bp, Unknown
  Encodes 16S rRNA from Xanthobacter
agagtttgatcctggctcagagcgaacgctggcggcaggcctaacacatgcaagtcgagcgcccggcaacgggagcggcagacgggtgagtaacgcgtggggatctacccattggtacggaataacccagggaaacttggactaataccgtatgtgtccttttggagaaagatttatcgccaatggatgaacccgcgtcggattagctagttggtggggtaaagg

SEQ ID NO: 1764 - DNA, 225 bp, Unknown
  Encodes 16S rRNA from unknown taxa
agagtttgatcctggctcagaacgaacgctggtagcgtggattaggcatgcaagtcgaacgggatccatgaagtagcaatacggattggtgagagtggcggaagggcgaggaacacgtgagcaacctgtccttgaggtggggaaaaccgttggaaacgacggctaataccgaatgtggcgcccggagacatctccggagcgctaaagggggcccaaaaggctctc

SEQ ID NO: 1765 - DNA, 225 bp, Unknown
  Encodes 16S rRNA from Desulfovibrio
agagtttgatcctggctcagattgaacgctggcggcgtgcttaacacatgcaagtcgaacgcgaaaggggcttcggccccgagtagagtggcgcacgggtgagtaacgcgtggataatctgcccctgtgactggaatagcgactggaaacggtcgataataccggatacgcccttgttgaacgatgaggggaaaggagacctctgcttgcaagtttccgtgcagg

SEQ ID NO: 1766 - DNA, 225 bp, Unknown
  Encodes 16S rRNA from Microbacterium
agagtttgatcctggctcaggatgaacgctggcggcgtgcttaacacatgcaagtcgaacggtgaaagcggagcttgctctgctggatcagtggcgaacgggtgagtaacacgtgagcaatctgcccttgactctgggataagcgctggaaacggcgtctaataccggatacgagctgcgaaggcatcttcagcagctggaaagaacttcggtcaaggatgagct

SEQ ID NO: 1767 - DNA, 225 bp, Unknown
  Encodes 16S rRNA from Oscillibacter
agagtttgatcatggctcaggatgaacgctggcggcgtgcctaacacatgcaagtcgaacgaagcattctggaaggagacttcggtcaacggaagggatgacttagtggcggacgggtgagtaacgcgtgagcaacctgcctcagagtgggggacaacagctggaaacggctgctaataccgcatgatacttttggaaggcatcttctgaaagtcaaagctttat

SEQ ID NO: 1768 - DNA, 225 bp, Unknown
  Encodes 16S rRNA from Blautia
agatttgatcatggctcaggatgaacgctggcggcgtgcctaacacatgcaagtcgaacggagatcttatggaaagcggcttcggccaatggatatctgatcttagtggcggacgggtgagtaacgcgtggggaacctgccctgtactgggggataacacccagaaatgagtgctaataccgcataagcgcacagtaccgcatggtacagtgtgaaaaactccgg

SEQ ID NO: 1769 - DNA, 225 bp, Unknown
  Encodes 16S rRNA from Papillibacter
agagtttgatcatggctcaggacgaacgctggcggcgtgcttaacacatgcaagtcgaacggagttatttccgacacggagccactgaggaattagtggttgcgtgttggggataacttagtggcgaacgggtgagtaacgcgtaagcaatctgccttacagagggggataacgtttggaaacgaacgctaataccgcataacgtcatgaagaggcatcttttta

SEQ ID NO: 1770 - DNA, 225 bp, Unknown
  Encodes 16S rRNA from Prevotella
agagtttgatcatggctcaggatgaacgctagctacaggcttaacacatgcaagtcgaggggcagcatgaagtttgcttgcaaactttgatggcgaccggcgcacgggtgagtaacgcgtatccgaccttccccctgcccaggtatagtccgctgaaaggcggtttaatccctggtgctgtcctgcgggtgcatgccatcgggacgaaaggatttccggcagggg

SEQ ID NO: 1771 - DNA, 225 bp, Unknown
  Encodes 16S rRNA from Lentisphaera
agagtttgatcatggctcagaatgaacgctggcggcatggattaggcatgcaagtcgaacgccccgggctttgcccggggagtggcgaaagggtgcgcaacgcgtggggaacccgcccccgggcccgggacaagcgctggaaacggcgtctgatacgggatgtcgagccgggccgcatggcccggcgtcgaaagattcatcgcccggggagggccccgcgtccca

SEQ ID NO: 1772 - DNA, 225 bp, Unknown
  Encodes 16S rRNA from Ruminococcus
agagtttgatcatggctcagattgaacgctggcggcacgcttaacacatgcaagtcgaacgggactaagagagaagcttgcttcacttttagtttagtggcggacgggtgagtaacacgtgagtaacctgcccttatcaggggaatagcctccggaaacggagagtaataccgcataagatgacgatgtggcatcacatagtcataaaagattttatcggataag

SEQ ID NO: 1773 - DNA, 225 bp, Unknown
  Encodes 16S rRNA from Bacteroides
agagtttgatcctggctcaggatgaacgctagcggcaggcttaacacatgcaagtcgaggggcagcgtgggggtagcaatactcccgacggcgaccggcgcacgggtgagtaacgcgtatgcaacctttcccagacagggggatagcccagggaaacttggattaataccccgtaggccagaagagggcatcctcatctggttaaagttccggcggtctggggtg

SEQ ID NO: 1774 - DNA, 225 bp, Unknown
  Encodes 16S rRNA from Catonella
agagtttgatcatggctcaggatgaacgctggcggcgtgcctaacacatgcaagtcgaacggggacgtcccgccgttgaagcttcggcagagacatgggacatcctagtggcggacgggtgagtaacgcgtgggcaacctgccctgtactgggggatagcagctggaaacggctggtaataccgcataagcgcacagtgtcgcatgacacagtgtgaaaagctcc

SEQ ID NO: 1775 - DNA, 225 bp, Unknown
  Encodes 16S rRNA from Clostridium XlVa
agagtttgatcctggctcaggatgaacgctggcggcgtgcttaatacatgcaagtcgaacggaagttattgggagcttgctcttgatgactttagtggcggacgggtgagtaacgcgtgggtaacctgcctcatacagggggataacagttagaaatgactgctaaaaccgcataacatgatggaaccgcatgatttcatcatcaaatatttataggtatgagat

SEQ ID NO: 1776 - DNA, 225 bp, Unknown
  Encodes 16S rRNA from Clostridium IV
agagtttgatcatggctcaggacgaacgctggcggcgtgcctaacacatgcaagtcgaacggagttaacaatggaagttccttcggggacggaagctgttaacttagtggcggacgggtgagtaacgcgtgagtaacctgcctttcagagggggataacgttcggaaacgaacgctaataccgcataacatagcgataccgcatggtaatgctatcaaaggagca

SEQ ID NO: 1777 - DNA, 225 bp, Unknown
  Encodes 16S rRNA from unknown taxa
agagtttgatcatggctcagaacgaacgctggtcgcgtggattaggcatgcaagtcgaacgggatccatgaagtagcaatacggattggtgagagtggcggaagggcgaggaacacgtgggcaacctgtctttgaggtggggaaaacctcgggaaactgaggctaataccgaatgtggcgcggaagggcatccttcctgcgctaaagggggcgaaagctccccct

SEQ ID NO: 1778 - DNA, 225 bp, Unknown
  Encodes 16S rRNA from Clostridium XI
agagtttgatcatggctcaggatgaacgctggcggcgtgcttaacacatgcaagtcgaacggagatacgtaaaagaagttttcggatggaatttacatatcttagtggcggacgggtgagtaacacgtaaacaatctgcctttgagagcgggataacagatagaaatatttgctaataccgcataagaccacaacatcgcatgatgaaggggtaaaaggggagca

SEQ ID NO: 1779 - DNA, 225 bp, Unknown
  Encodes 16S rRNA from Prevotella
agagtttgatcatggctcaggatgaacgctagctacaggcttaacacatgcaagtcgaggggtaacgggcagcagtgcttgcactgctgtgctgacgaccggcgcacgggtgagtaacgcgtatccaaccttcccatgagtagtgcatagcccggcgaaagtcggattaattcactatatgtggcatttcggcatctttatgtcacgaaagattcatcgctcatg

SEQ ID NO: 1780 - DNA, 225 bp, Unknown
  Encodes 16S rRNA from unknown taxa
agagtttgatcatggctcaggatgaatgctggcggcgtgcctaatacatgcaagtcgagcggtaacagggggactcaccgtactcttgacactcttgcccagagaggaagaggtcggatcgagggtacagtgagtccccgctgacgagcggcggacggctgagtaacgcgtgggaacataccccaaactgagggataactagtcgaaagattagctaataccgca

SEQ ID NO: 1781 - DNA, 225 bp, Unknown
  Encodes 16S rRNA from Mogibacterium
agagtttgatcctggctcaggatgaacgctggcggcgtgcctaatacatgcaagtcgagcgagaagccaatttgaagcgttttcggacaattctgtttggtggaaagcggcggacgggtgagtaacgcgtaggcaacctgcccttagcagagggatagccattggaaacgatgattaaaacctcataatgccgattcaacacatgttgaaccggccaaagattta

SEQ ID NO: 1782 - DNA, 225 bp, Unknown
  Encodes 16S rRNA from Clostridium XlVa
agagtttgatcctggctcaggatgaacgctggcggcgtgcctaacacatgcaagtcgaacggggtttagatgaaacctagtgattctaaacctagtggcggacgggtgagtaacgcgtgggtaacctgccgtatgcagggggacaacagttggaaacgactgctaataccgcataagcgcacagcttcacatggagcagtgtgaaaagatttatcggcatacgat

SEQ ID NO: 1783 - DNA, 225 bp, Unknown
  Encodes 16S rRNA from Ruminococcus
agatttgatcctggctcaggacgaacgctggcggcacgcttaacacatgcaagtcgaacgggactaagagagaagcttgcttcacttttagtttagtggcggacgggtgagtaacacgtgagtaacctgcccttatcaggggaatagcctctggaaacggagagtaataccgcataagatggcaatgtggcatcacatagtcataaaagattttatcggataagg

SEQ ID NO: 1784 - DNA, 225 bp, Unknown
  Encodes 16S rRNA from Eubacterium
agagtttgatcatggctcaggattaacgctggcggcgtgcctaacacatgcaagtcgagcgagaaatagtgatatgaaacttcggtagattggatctatggacagcggcggacgggtgagtaacgcgtgggcaacctgcccctttctggaggatagccaagggaaactttgaataatactccataacgcaagagcatcgcatggtgcacttgccaaagatttatc

SEQ ID NO: 1785 - DNA, 225 bp, Unknown
  Encodes 16S rRNA from Clostridium IV
agagtttgatcctggctcaggacgaacgctggcggcgtgcctaacacatgcaagtcgagcggagacataccacgaagtgaaagttttcggacggaagcggagagatatgttttagcggcggacgggtgagtaacgcgtgagcaacctgtccctcacagggggataacacatcgaaaggtgtactaataccgcatgagaccacggcgggacatctcgcaggggtca

SEQ ID NO: 1786 - DNA, 225 bp, Unknown
  Encodes 16S rRNA from Rhodomicrobium
agagtttgatcctggctcagaacgaacgctggcggcaggcttaacacatgcaagtcgaacgcgtgcagcaatgcacgagtggcgcacgggtgagtaacgcgtggatatctgccttttggttcggaataaccccgggaaactggggctaataccggatggttcctacgggataaagatttatcgccaaaagatgagtccgcgtccgattagctagttggtggggta

SEQ ID NO: 1787 - DNA, 225 bp, Unknown
  Encodes 16S rRNA from Butyricicoccus
agagtttgatcatggctcaggacgaacgctggcggcgtgcctaacacatgcaagtcgaacggagaacccacgaacgagttttcggacaagtaagtggaattcttagtggcggacgggtgagtaacgcgtgagcaacctgcctttcagagggggataacagtgggaaaccactgctaataccgcataacgtatatataaggcatcttagatataccaaaggagcaa

SEQ ID NO: 1788 - DNA, 225 bp, Unknown
  Encodes 16S rRNA from Saccharofermentans
agagtttgtcctggctcaggatgaacgctggcggcgtgcttaacacatgcaagtcgaacggagatatatgtatgaagttttcggatggaatgtatatatcttagtggcggacgggtgagtaacgcgtaaacaatctgccttagagagggggataacagatagaaatatctgctaataccgcataagaccacgtacaggcatctagacggggtaaaaggagcaatc

SEQ ID NO: 1789 - DNA, 225 bp, Unknown
  Encodes 16S rRNA from Prevotella
agagtttgatcatggctcaggatgaacgctagctacaggcttaacacatgcaagtcgaggggcagcatgggagttgcttgcaattcccgatggcgaccggcggatgggtgagtaacgcgtatccaacctgtcccgcgcgcggggacagcccttggaaatgaggattaacccccgataggccatggggccgcatggtttcatggtgaacctttgcgcgggttgggg

SEQ ID NO: 1790 - DNA, 225 bp, Unknown
  Encodes 16S rRNA from Mannheimia
agagtttgatcatggctcaggacgaacgctggcggcgtgcttaacacatgcaagtcgaacggggaatattgcacaatgggggaaaccctgatgcagccatgccgcgtgtgtgaagaaggccttcgggttgtaaagcacttttgcattcgaggaagacggcgtataaataaatgcgctatttgacgttagagtgtgaataagcaccggcaaactccgtgccagcag

SEQ ID NO: 1791 - DNA, 225 bp, Unknown
  Encodes 16S rRNA from Lactobacillus
agagtttgatcatggctcaggacgaacgctggcggcgtgcctaatacatgcaagtcgaacgagactttttatttgatgcttgcatcttttaaaaagttgagtggcgaacgggtgagtaacacgtgggtaacctgccttaaagtgggggataacacttggaaacaggtgctaataccgcataaccatcaaaaccgcctggttttgatgttaaagatggttctgcta

SEQ ID NO: 1792 - DNA, 225 bp, Unknown
  Encodes 16S rRNA from Clostridium IV
agagtttgatcctggctcaggagaaacgctggcggcgcacataagacatgcaagtcgaacggaacttagttgaatgtttacatgagacgaaagtttagtggcggacgggtgagtaacacgtgagcaacctgcctttaagagggggataacattgagaaatcagtgctaataccgcataaagcatagcattcgcatgtaagctatgccaaaggagaaatccgctta

SEQ ID NO: 1793 - DNA, 225 bp, Unknown
  Encodes 16S rRNA from Clostridium IV
agagtttgatcatggctcaggataaacgctggcggcgtgcataacacattcaagtcgaacggactgattggggagcttgctctccatgaaagttagtggcggacgggtgagtaacgcgtgagcaacctgcctttgcgagggggataacacagagaaatttgtgctaataccgcatgacgcaccgaggtcacatggccatggtgtcaaaggagcaatccgcgcaaa

SEQ ID NO: 1794 - DNA, 225 bp, Unknown
  Encodes 16S rRNA from Adlercreutzia
agagtttgatcctggctcaggatgaacgctggcggcgtgcctaacacatgcaagtcgaacggttaaaccggcttcggccggatatagagtggcgaacgggtgagtaacacgtgaccaacctgccccccgctccgggataacccagggaaacctgcgctaataccggacgatgccgcaagggcgcatgccctcgcggccgaagcccaggcggcgggggatggggtc

SEQ ID NO: 1795 - DNA, 225 bp, Unknown
  Encodes 16S rRNA from Selenomonas
agagtttgatcatggctcaggacgaacgctggcggcgtgcttaacacatgcaagtcgaacgggactgattgaaagcttgcttttgaaaagtctagtggcaaacgggtgagtaacgcgtaggcaacctgcctctaagatggggacaacagtccgaaaggactgctaataccgaatgttgtgagtttttcgcatgaaagactcattaaagatggcctctacttgtaa

SEQ ID NO: 1796 - DNA, 225 bp, Unknown
  Encodes 16S rRNA from Paenibacillus
agagtttgatcatggctcaggatgaacgctggcggcatgcctaagacatgcaagtcgtacgcgagggcccaatgaagacattgaaactgaagaagcttgcttctgatgtggatttgttggatttggattttccctcgagtggcaaacgggtgagtaacacgtgggttacctgcctctatgttggggataacagttggaaacgattgctaataccgaatatgctct

SEQ ID NO: 1797 - DNA, 225 bp, Unknown
  Encodes 16S rRNA from Clostridium IV
agagtttgatcctggctcaggacgaacgctggcggcgcgcctaacacatgcaagtcgaacggagagtgtgttttgaattcttcggaaggaaaggcacatttcttagtggcggacgggtgagtaacacgtgagcaacctgccttgtagagggggataacgattggaaacgatcgctaataccacatgatatatgggtatcgcatggtaaccatatcaaagatttat

SEQ ID NO: 1798 - DNA, 225 bp, Unknown
  Encodes 16S rRNA from Paenibacillus
agagtttgatcatggctcaggatgaacgctggcggcatgcctaagacatgcaagtcgaacgaggtggcccaatgaaggtggagtgcttgcacaatactggatttggattcccgcctagtggcagacgggtgagtaacacgtgggttacctacctctttgttggggataacagttggaaacgattgctaataccgaataagatactcgtattgaaaggagctttca

SEQ ID NO: 1799 - DNA, 225 bp, Unknown
  Encodes 16S rRNA from Butyricimonas
agagtttgatcctggctcaggatgaacgctagcggcaggcttaacacatgcaagtcgaggggcagcgcggggtagcaatactctggcggcgaccggcggaagggtgcgtaacgcgtgagcaacttgcccgtcactgggggataggcactggaaacggtgtgtaatactccataacatatggattcacatggatttatattgaaagattcgttggtgacggatggg

SEQ ID NO: 1800 - DNA, 225 bp, Unknown
  Encodes 16S rRNA from Wandonia
agagtttgatcatggctcaggatgaacgctagcggcaggcctaacacatgcaagtcgaggggcagcaggaggtagcaataccttgctggcgaccggcgcacgggtgcgtaacgcgtatgcaacctacccatgacagggggataacggagagaaatttccactaataccccgtattgttcaggaatcgcatggtttttggacgaaagcctttgggcggtcatggac

SEQ ID NO: 1801 - DNA, 225 bp, Unknown
  Encodes 16S rRNA from Puniceicoccus
agagtttgatcatggctcagagtgaacgctggcgacgtggctaagacatgcaagtcgagcgagaaggtgccttcgggtatcggaaagcggcaaacgggtgcgtaacacgtaagtaacctgcccttaagacgggaatagcttgatgaaaattgagataatgcccgatatcaaattcttccgcatggaagaagtttgaaaggtttgtgatgacgcttaaggagggac

SEQ ID NO: 1802 - DNA, 225 bp, Unknown
  Encodes 16S rRNA from Lactonifactor
agagtttgatcatggctcaggatgaacgctagctacaggcttaacacatgcaagtcgaggggcagcatcgggcagtgggggatattgcacaatgggcgcaagcctgatgcagcgacgccgcgtgaaggaagacgtatttcggtatgtaaacttctatcagcggggaagaagatgacggtacccgactaagaagccccggctaattacgtgccagcagccgcggta

SEQ ID NO: 1803 - DNA, 225 bp, Unknown
  Encodes 16S rRNA from Selenomonas
agagtttgatcatggctcaggacgaacgctggcggcgtgcttaacacatgcaagtcgaacgagacggattgaaagcttgcttttgaaatgtcgagtggcaaacgggtgagtaacgcgtagacaacctgccgcaaagatggggacaacagtccgaaaggactgctaataccgaatgttgtcaagtttccgcatgggagcttgattaaagatggcctctacttgtaa

SEQ ID NO: 1804 - DNA, 225 bp, Unknown
  Encodes 16S rRNA from Brevundimonas
agagtttgatcatggctcaggacgaacgctggcggtgtgcctcatacatgcaagtcgaacgataaggttccttcgggaatacataagtggcggacgggtgagtacaacataggaaatctgccctaaagcgggggacaacagagggaaactcctgctaataccccatatgagcttggttgaaataccaatcttgaaagatttatcactttaggatgagcctgtgcc

SEQ ID NO: 1805 - DNA, 225 bp, Unknown
  Encodes 16S rRNA from Prevotella
agatttgatcctggctcaggatgaacgctagctacaggcttaacacatgcaagtcgaggggcagcgggaagtttgcttgcaagcttcgccggcgaccggcgcacgggtgagtaacgcgtatccaacctgccccacggtcggggacagcccggcgaaagtcggattaacccccgatggtcccgcaagacggcatcagattgcgggtaaaggctcgtccgccgtggg

SEQ ID NO: 1806 - DNA, 225 bp, Unknown
  Encodes 16S rRNA from Gelidibacter
agagtttgatcctggctcaggataaacgctagcggcaggcctaacacatgcaagtcgagcggcaacgggagtagcaatacttgccggcgagcggcggacgggtgagtaacgcgtatgcaacctgcccatcacacggagatagccgaccgaaaggacgattaaactccgatggcatcaagagggggcatccccatttgattaaatattcataggtgatggatgggc

SEQ ID NO: 1807 - DNA, 225 bp, Unknown
  Encodes 16S rRNA from Mogibacterium
agagtttgatcctggctcaggatgaacgctggcggcgtgcctaatacatgcaagtcgagcgagaagctccattgaagcgttttcggacaattcaaaggagtggaaagcggcggacgggtgagtaacgcgtaggcaacctgcccttagcagagggatagccattggaaacgatgattaaaacctcataacgccaactcaacacatgttgagctggccaaagattta

SEQ ID NO: 1808 - DNA, 225 bp, Unknown
  Encodes 16S rRNA from Clostridium XlVa
agagtttgatcatggctcaggatgaacgctggcggcgtgcctaacacatgcaagtcgaacgaagttgtttccatccgacagaatatcttcggatatgaagtcaccggaaacgcttagtggcggacgggtgagtaacgcgtgggcaacctgccctacacagggggatagcggttggaaacgaccggtaataccgcatacctttattgaaccgcatgatttaataaa

SEQ ID NO: 1809 - DNA, 225 bp, Unknown
  Encodes 16S rRNA from Coprococcus
agagtttgatcatggctcagattgaacgctggcggcgtgcttaacacatgcaagtcgaacggactgatgagagagcttgctctttctgaaagttagtggcggacgggtgagtaacgcgtgggaaacctgccttacactgggggataacagatggaaacgcctgttaataccgcataagcgcacggtgctgcatggtaccgtgtgaaaaactctggtggtgtaaga

SEQ ID NO: 1810 - DNA, 225 bp, Unknown
  Encodes 16S rRNA from unknown taxa
agagtttgatcatggctcagaacgaacgctggcagcgtggattaggcatgcaagtcgaacgggatccggaaggtagcaatatcggccggtgagagtggcggaagggcgaggagcacgtggacaacctgtccagaggacggggaaaacctcgggaaactgaggctaatacccgatgcgccgggagctgggcatccatcttccggcaaagggggcgaaagctcccgc

SEQ ID NO: 1811 - DNA, 225 bp, Unknown
  Encodes 16S rRNA from Barnesiella
agagtttgatcatggctcaggatgaacgctagcgacaggcctaacacatgcaagtcgaggggcagcattatcgaagcttgctttgatagatggcgaccggcgcacgggtgagtaacgcgtatgcaacctgtccgtcatagtgggataatcccgagaaattgggtctaataccacgtatgccgtatatgggcatccatgtacggtgaaagagattcgttgacggtt

SEQ ID NO: 1812 - DNA, 225 bp, Unknown
  Encodes 16S rRNA from unknown taxa
agagtttgatcatggctcagaacgaacgctggcagcgtggatgaggcatgcaagtcgaacggtcgtgtgctggtagcaatattggtgcacgatagtggcggaagggcgagtaatgcgagagcaagctacccctcgattcggaacaacggctggaaacggccgctaatgccggatacgaacgcgaagccgcatggctttgcgttgaaaggccgggacccgcaaggg

SEQ ID NO: 1813 - DNA, 225 bp, Unknown
  Encodes 16S rRNA from Clostridium XlVa
agagtttgatcctggctcaggatgaacgctggcggcgtgcctaacacatgcaagtcgaacggagatgtgacaccggaagaggattcgtctgattccaccgttgcatcttagtggcggatgggtgagtaacgcgtggataacctgcccttcactgggggataacaaccggaaacgggtgctaataccgcataggcgcacggggccgcatggccttgagcgtaaaga

SEQ ID NO: 1814 - DNA, 225 bp, Unknown
  Encodes 16S rRNA from Anaerovorax
agagtttgatcatggctcaggatgaacgctggcggcgtgcttaacacatgcaagtcgagcgagaaacctaaaaatgacgcttcggtagattttttaggcggaaagcggcggacgggtgagtaacgcgtaggcaacctgcccttagcagagggatagcctcgggaaaccgggattaaaacctcataatactgtacattcacatgtatgtatagtcaaagatttatc

SEQ ID NO: 1815 - DNA, 225 bp, Unknown
  Encodes 16S rRNA from Bacteroides
agagtttgatcctggctcaggatgaacgctagcggcaggcttaacacatgcaagtcgaggggcagcgtgttggtagcaataccgacgacggcgaccggcgcacgggtgagtaacgcgtatgcaacctttcccagacagggggatagcccagggaaacttggattaataccccgtaggccacggatgggcatccgtctgtggttaaagttccggcggtctggggtg

SEQ ID NO: 1816 - DNA, 225 bp, Unknown
  Encodes 16S rRNA from Parasporobacterium
agagtttgatcatggctcaggatgaacgctggcggcacgcttaacacatgcaagtcgaacgaggttatggacttcggttaataacctagtggcggacgggtgcgtaacgcgtgggtaatctgcccttgacagggggataacgtatagaaatgtacgctaataccgcataagcccacgagaccgcatggtcttgagggaaaagggatactggtcaaggatgagccc

SEQ ID NO: 1817 - DNA, 225 bp, Unknown
  Encodes 16S rRNA from Prevotella
agagtttgatcatggctcaggatgaacgctagctacaggcttaacacatgcaagtcgcggggcagcatgaagccagcttgctggctttgatggcgaccggcgcacgggtgagtaacgcgtatccaacctgcccatgggcgaggcacagcccggcgaaagccggattaatgccttgcggtctccttgaaggccatccgccgaggagtaaaggcttttagccgccca

SEQ ID NO: 1818 - DNA, 225 bp, Unknown
  Encodes 16S rRNA from Parapedobacter
agagtttgatcctggctcaggatgaacgctagcggcaggcctaacacatgcaagtcgaggggcagcgcggtgtggcaacacactggcggcgaccggcggatgggtgcgtaacgcgtatgcaacctgcctccgagagggggataacccgtggaaacgcggactaataccccgtatgcgcacgacgccgcatgacgttgtgcggaaagattcattgctcggagatgg

SEQ ID NO: 1819 - DNA, 225 bp, Unknown
  Encodes 16S rRNA from Streptomyces
agagtttgatcatggctcaggacgaacgctggcggcgtgcttaacacatgcaagtcgaacggtgaaccagggcttgccctggggatcagtggcgaacgggtgagtaacacgtgggcaacctgccccagactctgggataactccgggaaaccggggctaataccggatacgacctccttgggcatcctcggaggtggaaagtttttcggtctgggatgggcccgc

SEQ ID NO: 1820 - DNA, 225 bp, Unknown
  Encodes 16S rRNA from unknown taxa
agagtttgatcctggctcaggatgaatgctggcggcgtgcctaacacatgcaagtcgagcggcagcgcgagtagtttactacttggcggcgagcggcggacggctgagtaacgcgtgggaatctgccctaaagtgagggataacgcaccgaaaggtgtgctaataccgcatatggtcttcggattaaagaatttattcgctttaggaggagcccgcgtcggatta

SEQ ID NO: 1821 - DNA, 225 bp, Unknown
  Encodes 16S rRNA from Thermotalea
agagtttgatcctggctcaggatgaacgctggcggcgtgcctaacacatgcaagtcgagcgagaaacctttcagaagattcttcggatgattcagagaggtggacagcggcggacgggtgagtaacgcgtgggcaacctgcccctatccggaggatagccaagggaaactttgaataatactccataaagcatggacatcacatggtgaccatgccaaagattta

SEQ ID NO: 1822 - DNA, 225 bp, Unknown
  Encodes 16S rRNA from Alkaliflexus
agagtttgatcctggctcaggatgaacgctagcggcaggcttaacacatgcaagtcgaggggcagcgcgggtagcaatacctggcggcgaccggcggaagggtgcgtaacgcgtgagcgacatacccgtgacagggggataacagatggaaacgtctcctaataccccataagatcatatatcgcatggtatgtgattgaaaggtgagaaccggtcacggattgg

SEQ ID NO: 1823 - DNA, 225 bp, Unknown
  Encodes 16S rRNA from Oscillibacter
agagtttgatcctggctcaggacgaacgctggcggcgtgcctaacacatgcaagtcgaacgagaatctatggacggaggcttcggccaactgaaatagaggaaagtggcgaacgggtgagtaacgcgtgagaaacctgccttggagtgggggacaacagttggaaacgactgctaataccgcataatatgcctgaggggcatccctccgggcatcaaagctttat

SEQ ID NO: 1824 - DNA, 225 bp, Unknown
  Encodes 16S rRNA from Anaerotruncus
agagtttgatcatggctcaggagaaacgctggcggcgcacataagacatgcaagtcgaacggaacttagtcgaatgttaaccaggagacgaaagtttagtggcggacgggtgagtaacacgtgagcaacctaccttagagagggggataacattgagaaatcagtgctaataccgcataaagctattagttcgcatggacaagatagccaaaggagaaatccgct

SEQ ID NO: 1825 - DNA, 225 bp, Unknown
  Encodes 16S rRNA from Spirochaeta
agagtttgatcatggctcagaacgaacgctggcggcgcgtcttaagcatgcaagtcgagcgggagtaagggagcttgcttccttatgagagcggcggactggtgagtaacacgtgggtaacgcaccctcctgacggggacagcctgtggaaacacagggtaataccggatgagatggacttctggaagggagttcatgaaaggagctacggctccgcagggggaa

SEQ ID NO: 1826 - DNA, 225 bp, Unknown
  Encodes 16S rRNA from Clostridium XI
agagtttgatcctggctcaggatgaacgctggcggcgtgcttaacacatgcaagtcgaacggagacatatgacggaagttttcggatggaagatatatgtcttagtggcggacgggtgagtaacacgtaaacaatctgcctttgagagcgggacaacagatagaaatatttgctaataccgcataagaccacaggttcgcatgaactaggggtaaaaggggagca

SEQ ID NO: 1827 - DNA, 225 bp, Unknown
  Encodes 16S rRNA from Sporotomaculum
agagtttgatcatggctcaggacgaacgctggcggcgtgcttaacacatgcaagtcgaacgaggaatgtttgaaagcttgcttttggacatttcgagtggcggacgggtgagtaacgcgtgaggaacctgtcttctacagggggataacgtcccgaaagggacgctaataccgcataagaccacagtgccgcatggcagaggggtcaaaggagagatccggtaga

SEQ ID NO: 1828 - DNA, 225 bp, Unknown
  Encodes 16S rRNA from Sporacetigenium
agagtttgatcctggctcaggacgaacgctggcggcgtgcctaacacatgcaagtcgagcgaggggaggggcttcggccccgaaccgagcggcggacgggtgagtaacgcgtgaatgatctgtcccttacaggggaataacacttggaaacaggtgctaataccgcataagaccacggtgctgcatggcactgaggtaaaaggagcgatccggtgaggggtgagt

SEQ ID NO: 1829 - DNA, 225 bp, Unknown
  Encodes 16S rRNA from Bulleidia
agagtttgatcatggctcaggataaacgctggcggcgtgcctaatacatgcaagtcgaacgaagggaaccagtttactggtgaacttagtggcgaacgggtgagtaatacgtaagcaacctgcccacggagaccgggataatccctggaaacggggactaagaccggataggcagcggaggggcatcccactgctgttaaagatggaaaacactggtggatgggc

SEQ ID NO: 1830 - DNA, 225 bp, Unknown
  Encodes 16S rRNA from Clostridium IV
agagtttgatcctggctcaggacgaacgctggcggcacgcttaacacatgcaagtcgaacggagttttgagagcttgctcttaaaacttagtggcggacgggtgagtaacacgtgagcaacctgccttcgggtgtggaataatggctggaaacgaccactaataccgcataacacgatcggaccgcatgatctgatcgtcaaaggtttaccgcctgaagatgggc

SEQ ID NO: 1831 - DNA, 225 bp, Unknown
  Encodes 16S rRNA from Syntrophomonas
agagtttgatcatggctcaggacgaacgctggcggcgtgcctaacacatgcaagtcgaacgggaattaaacgagaatttcggttcatgtttaattttagtggcggacgggtgagtaacgcgtgagaatctgcctttaagtggggaataacagttggaaacgactgctaataccgcataacatgggaaaccatcaaagggggtgcaagccctcgcttagagatgag

SEQ ID NO: 1832 - DNA, 225 bp, Unknown
  Encodes 16S rRNA from Desulfatiferula
agagtttgatcctggctcaggatgaacgctggcggcgtgcatcatacatgcaagtcgaacgagaatctatagcttgctatagaggaaagtggcggacgggtgagtaaaatatagggaatctgcccgtaagagggggacaacaaggggaaacctttgctaataccgcatatgagatattctgaaatggatatcttgaaagaatttatcgcttacggatgagcctgt

SEQ ID NO: 1833 - DNA, 225 bp, Unknown
  Encodes 16S rRNA from Hydrogenoanaerobacterium
agagtttgatcatggctcaggacgaacgctggcggcgcgcctaacacatgcaagtcgaacggagaaagttcttcggagctttcttagtggcgaacgggtgagtaacacgtgagcaacctgcctttctgagggggataacgtttggaaacgaacgctaataccgcatgacaccgtagagtcacatggctcagcggtcaaaggagtaatccgcagaaagatgggctc

SEQ ID NO: 1834 - DNA, 225 bp, Unknown
  Encodes 16S rRNA from Clostridium XlVa
agagtttgatcctggctcaggatgaacgctggcggcgtgcctaacacatgcaagtcgaacggaactttaatgaagcctagcgatttaaagtttagtggcggacgggtgagtaacgcgtgggtaacctgccgtatgcagggggacaacagttggaaacgactgctaataccgcataagcgcacagcttcgcatggagcagtgtgaaaagatttatcggcatacgat

SEQ ID NO: 1835 - DNA, 225 bp, Unknown
  Encodes 16S rRNA from Mogibacterium
agagtttgatcctggctcaggatgaacgctggcggcgtgcctaatacatgcaagtcgagcgagaaattgatcagacgcgttttcggacaagtcaggtcaatggaaagcggcggacgggtgagtaacgcgtaggcaacctgcccttagcagagggatagccattggaaacgatgattaaaacctcataatgccggaggagcacatgctccatcggccaaagattta

SEQ ID NO: 1836 - DNA, 225 bp, Unknown
  Encodes 16S rRNA from Spirochaeta
agagtttgatcatggctcagaacgaacgctggcggcgcgtcttaagcatgcaagtcgagcggtaagattggtgcttgcaccgatcctagagcggcggactggtgagtaacgcgtgggtgacctaccccgtggatgggaatagccggtagaaataccgggtaatgccgaatacggtccctgacgtcagaggtcagggaggaaaggagctccggctccgccacggga

SEQ ID NO: 1837 - DNA, 225 bp, Unknown
  Encodes 16S rRNA from Prevotella
agagtttgatcctggctcaggatgaacgctagctacaggcttaacacatgcaagtcgaggggcagcatgtcgtgtgcttgcacgcgatgatggcgaccggcgcacgggtgagtaacgcgtatccaacctgcccatgaccccgggatagcccgctgaaaagcggattaacaccggatgcggtcgaaagaggacatctgatttcgaccaaagcttcggcggtcatgg

SEQ ID NO: 1838 - DNA, 225 bp, Unknown
  Encodes 16S rRNA from Treponema
agagtttgatcctggctcagaacgaacgctggcggcgcgtcttaagcatgcaagtcgagcgggattcggtagcttgctaccgatgagagcggcggactggtgagtaacacgtaggtgacgtaccttgaggacggggacagccggcagaaatgccgggtaataccggataagctcgcgcgagccggaatcgcgcgaggaaaggagctaaggctccgcctccagagc

SEQ ID NO: 1839 - DNA, 225 bp, Unknown
  Encodes 16S rRNA from Spiroplasma
agagtttgatcatggctcaggatgaacgctggcggcatgcctaagacatgcaagtcgaacgaagtggcccaacaaaaactgcgtacttgtacaaagttggcgatggaatttccacttagtggcagacgggtgagtaatacataagtaatctgccctcaagactggaataatgtctggaaacggacactaataccggataattcatttatagataactatttatgc

SEQ ID NO: 1840 - DNA, 225 bp, Unknown
  Encodes 16S rRNA from Clostridium XlVa
agagtttgatcctggctcaggatgaacgctggcggcgtgcctaacacatgcaagtcgagcggagtaagccaccggatgaagattcgtcggattccaccggtttacttagcggcggatgggtgagtaacgcgtggacaacctgcccttcactgggggataacaaccggaaacgggtgctaataccgcatgggcgcgacgggccgcatgacctgtagcgtaaagatt

SEQ ID NO: 1841 - DNA, 225 bp, Unknown; identical to SEQ ID NO: 1526
  Encodes 16S rRNA from Bacteroides

SEQ ID NO: 1842 - DNA, 225 bp, Unknown
  Encodes 16S rRNA from Treponema
agagtttgatcatggctcagaacgaacgctggcggcgcgtcttaagcatgcaagtcgagcgggaatgtggtgcttgcaccacaggagagcggcggactggtgagtaacgcgtggatgacgcacccccctgacggggacagcctgcagaaatgcagggtgataccggatacgatcttgggtattggaagcccgagaggaaagcacctgcgggtgcgcagggggagc

SEQ ID NO: 1843 - DNA, 225 bp, Unknown
  Encodes 16S rRNA from Selenomonas
agagtttgatcctggctcaggacgaacgctggcggcgtgcttaacacatgcaagtcgaacggggcaattgaaagcttgcttttgagagcctagtggcaaacgggtgagtaacgcgtaggcaacctgccttcgggatggggacaacaggacgaaagccctgctaataccgaatgaagcatccttcctgcatgggaagggtatgaaagatggcctctgaatatgcta

SEQ ID NO: 1844 - DNA, 225 bp, Unknown
  Encodes 16S rRNA from Butyricicoccus
agagtttgatcctggctcaggacgaacgctggcggcgtgcctaacacatgcaagtcgaacggggtaccctctacggaagcttcggccgaagaagaggactacctagtggcggacgggtgagtaacgcgtgagcaacctgcctttaagagggggataacataccgaaaggtatgctaataccgcataagatattagtaccgcatgatacagatatcaaagatttca

SEQ ID NO: 1845 - DNA, 225 bp, Unknown
  Encodes 16S rRNA from Gelidibacter
agagtttgatcatggctcaggataaacgctagcggcaggcctaacacatgcaagtcgagcggcagcacggtgtagcaatacattggtggcgagcggcggacgggtgagtaacgcgtatgcaacctacctgtaacacggggatagccaaccgaaaggatgattaacacccgatagtacttttaaactgcatggtttaaaagttaaatatttataggttacagatgg

SEQ ID NO: 1846 - DNA, 225 bp, Unknown
  Encodes 16S rRNA from Acetitomaculum
agagtttgatcctggctcaggatgaacgctggcggcgtgcctaacacatgcaagtcgaacggagccggatggaaggagccttcgggtgacagaaatccatgcttagtggcggacgggtgagtaacgcgtgggcaacctgccctgtggagggggatacctgttggaaacggcagttaataccccatgagcgcacgcctgtgcatgcaggcgtgtgaaaaggagcaa

SEQ ID NO: 1847 - DNA, 225 bp, Unknown
  Encodes 16S rRNA from Proteiniclasticum
agagtttgatcatggctcaggacgaacgctggcggcgtgcttaacacatgcaagtcgagcggggataatgagacggaaggcttcggccggaagacttattattctagcggcggacgggtgagtaacgcgtgaatgatctgtctcttacagggggataacacttggaaacaggtgctaataccgcataagaccacggggctgcatggctttggggtaaaaggagca

SEQ ID NO: 1848 - DNA, 225 bp, Unknown
  Encodes 16S rRNA from Papillibacter
agagtttgatcatggctcaggatgaacgctggcggcgtgcataacacattcaagtcgaacgaagcactgtcgaggaagtcttcggacggaattgactttgacttagtggcggacgggtgagtaacgcgtgagcaaccttcctgcctgtgagggataacacagggaaacttgtgctaataccgcatgaagcatgattatcgcatggtagacatgccaaagattaat

SEQ ID NO: 1849 - DNA, 225 bp, Unknown
  Encodes 16S rRNA from Prevotella
agagtttgatcctggctcaggatgaacgctagcggcaggcttaacacatgcaagtcgaggggcagcgcggtagtagcaatactactggcggcgaccggcgaaagggtgcgtaacgcgtgagcgacatgcccgcgaccgggggataacagatggaaacgtctactaataccccataacaacagggttcgcatggatcttgtttgaaagatttatcgtttgcggatt

SEQ ID NO: 1850 - DNA, 225 bp, Unknown
  Encodes 16S rRNA from Elusimicrobium
agagtttgatcctggctcagagttaacgctggcagcgtgcataacacatgcaagtcgaacggggattattcgatgtagcaatacattggataattctagtggcagacgagtgagtaatacataagaaatctacccgaaagtggggaataacgggccgaaaggttcgctaataccccataatatttgaaagcggcatcgctttcttcttaaaggtttttcgctttc

SEQ ID NO: 1851 - DNA, 225 bp, Unknown
  Encodes 16S rRNA from Lachnospiracea incertae sedis
agagtttgatcatggctcaggatgaacgctggcggcgcgcttaacacatgcaagtcgaacggaatttatagcttcggttgtaaattcagtggcggacgggtgagtaacgcgtggataacttgccttttagtgggggatagctgagagaaatctcaattaataccgcataaagtaatttattcgcatgaatagattaataaagatgaaaatcgctaaaagataggt

SEQ ID NO: 1852 - DNA, 225 bp, Unknown
  Encodes 16S rRNA from Devosia
agagtttgatcatggctcagaacgaacgctgtcgacatgcttaacacatgcaagtcggacgggtataacttgttataccagtggcaaacgggtgagtaatacgtagaaatgtacccagtagttccgaataacaactggaaacggttggtaatacgggataagatagagatatgaaagatctgaaaggatcgctattggagcagtctacgatggattagatagttg

SEQ ID NO: 1853 - DNA, 225 bp, Unknown
  Encodes 16S rRNA from Roseburia
agagtttgatcctggctcaggatgaacgctggcggcgtgcctaacacatgcaagtcgagcggacctgacggagtgaatagcttgctaggaactccagactggttagcggcggacgggtgagtaacgcgtgggtaacctgcctcatacagggggatagcagttggaaacgactggtaataccgcataagcgcacagtaccgcatggtacggtgtgaaaaactccgg

SEQ ID NO: 1854 - DNA, 225 bp, Unknown
  Encodes 16S rRNA from Mucilaginibacter
agagtttgatcatggctcaggatgaacgctagcggcaggcctaatacatgcaagtcggacgggaactccccttcgggggagcgagagtggcgcacgggtgcgtaacgcgtatgcaaccaaccccgcactgggggacagccggtggaaacgccgggtaataccccatgccgaccctgtggggcatcccatggggtcgaaagcagcgatgcggtgcgggacgggcat

SEQ ID NO: 1855 - DNA, 225 bp, Unknown
  Encodes 16S rRNA from Mogibacterium
agagtttgatcatggctcaggatgaacgctggcggcgtgcctaatacatgcaagtcgagcgagaatcttcagaaacaattcttcggatgcgtttcaggagaggaaagcggcggacgggtgagtaacgcgtaggcaacctgcccctggcagagggatagccattggaaacgatgattaaaacctcataacgcttcaagagcacatgctgttgaagccaaagattta

SEQ ID NO: 1856 - DNA, 225 bp, Unknown
  Encodes 16S rRNA from Saccharofermentans
agagtttgatcctggctcaggacgaacgctggcggcgtgcctaacacatgcaagtcgagcggagatattttccggaaagcttcggccggaaggggaatattttagcggcggacgggtgagtaacgcgtgagcaacctttccttcacagggggataaagcaccgaaaggtgccctaataccgcatgagaccacggcatcacatgaagcaggggtcaaaggagcaat

SEQ ID NO: 1857 - DNA, 225 bp, Unknown
  Encodes 16S rRNA from Paenibacillus
agagtttgatcatggctcaggattaacgctggcggcatgcctaagacatgcaagtcgaacgagagggcccattgacatttatcgaaagttgaagtgcttgcactgatgctggacttatttagatttggattttccctctagtggcaaacgggtgagtaacacgtgggttacctgcctcttagactgggataccgattggaaacgatcgttaataccggatgttct

SEQ ID NO: 1858 - DNA, 225 bp, Unknown
  Encodes 16S rRNA from Anaerotruncus
agagtttgatcatggctcaggacgaacgctggcggcgcgcttaacacatgcaagtcgaacggagttgatttttaacacccgagtctgcgaggcaggagctttgcagattgggggttaagaatcaacttagtggcggacgggtgagtaacacgtgagcaacctgcctttcagagggggataacgtctggaaacggacgctaataccgcatgaagtatatttttcgc

SEQ ID NO: 1859 - DNA, 225 bp, Unknown
  Encodes 16S rRNA from Leucobacter
agagtttgatcctggctcaggacgaacgctggcggcgtgcttaacacatgcaagtcgaacgctgaagcccggagcttgctctgggtggatgagtggcgaacgggtgagtaacacgtgagtaacctgcccctcactctgggataagcgctggaaacggcgtctaatactggatatgacccataccggcatcggtagtgggtggaaagatttatcggtgggggatgg

SEQ ID NO: 1860 - DNA, 225 bp, Unknown
  Encodes 16S rRNA from Clostridium XlVa
agagtttgatcatggctcaggatgaacgctggcggcgtgcctaacacatgcaagtcgagcggagaggctgcggagattcaatagatgatctgcatcttcttagcggcggatgggtgagtaacacgtgggtaacctgccctgcactggggaataacagttggaaacgactgttaataccgcatatgcgcacggggtcgcatgaccccgggcggaaagatttatcgg

SEQ ID NO: 1861 - DNA, 225 bp, Unknown
  Encodes 16S rRNA from Eubacterium
agagtttgatcatggctcaggatgaacgctagcggcaggcttaacacatgcaagtcgaggggcatcgcggggtagcaataccctggcggcgaccggcgaaagggtgcgtaacgcgtgagcgacatgcccgtcacagggggataaccggcggaaacgccgcctaataccccatatgaggccaggccacatggctgggtcttgaaagtcaaggcggtgacggattgg

SEQ ID NO: 1862 - DNA, 225 bp, Unknown
  Encodes 16S rRNA from Beijerinckia
agagtttgatcctggctcagaacgaacgctggcggcaggcttaacacatgcaagtcgaacggaacatagggagcttgctccttatgtcagtggcgcacgggtgagtaacgcgtaggaatctgtccttttgcctgggatagcctctggaaacggagggtaaaaccggatgagccctaagggggaaatgagcaatcagctggaggaggagcctgcgttagattaggc

SEQ ID NO: 1863 - DNA, 225 bp, Unknown
  Encodes 16S rRNA from Prevotella
agagtttgatcctggctcaggatgaacgctagctacaggcttaacacatgcaagtcgaggggcagcgggagagtagcttgctactcttgccggcgaccggcgcacgggtgagtaacacgtatccaacctgccctgaaccccgggatagccctctgaaaggaggattaataccggatgtggccgctgggggacatcccccggcgtctaaagattcatcggttgagg

SEQ ID NO: 1864 - DNA, 225 bp, Unknown
  Encodes 16S rRNA from Clostridium III
agagtttgatcatggctcaggacgaacgctggcggcgtgcctaacacatgcaagtcgagcggaggaaatcgaaagaagccttcgggtgaattttggtggacttagcggcggacgggtgagtaacgcgtgagtaacctgcccataagagggggataatccttggaaacggggactaataccgcatatagagtatttgttgcatgattgatacttgaaagatttatc

SEQ ID NO: 1865 - DNA, 225 bp, Unknown
  Encodes 16S rRNA from unknown taxa
agagtttgatcctggctcaggacgaacgctggcggcgtgcttcatacatgcaagtcgaacgagaaattaccttcgggtaatggacagtggcggacgggtgagtaatgtgtagagaatctgccctttagtgggggatagcagttggaaacgactattaataccccatatgcgcgtagttgggatactattcgtgaaagattaatcgctaaaggatgagtctgcatc

SEQ ID NO: 1866 - DNA, 225 bp, Unknown
  Encodes 16S rRNA from Pseudoflavonifractor
agagtttgatcctggctcaggacgaacgctggcggcgtgcttaacacatgcaagtcgaacgagggtattagtcagcttgctgattgatacccgagtggcggacgggtgagtaacgcgtgaggaacctgtcttcatcagggggataacttcccgaaagggatgctaataccgcataagaccacgataccgcatggtattgaggtcaaaggagcaatccggatgaag

SEQ ID NO: 1867 - DNA, 225 bp, Unknown
  Encodes 16S rRNA from Butyrivibrio
agatttgatcatggctcaggatgaacgctggcggcgtgcctaacacatgcaagtcgaacggacgctttgaggagagtcttcggatgattcttaaagttgttagtggcggacgggtgagtaacgcgtggggaacctgcctttgtccgggggatagcagctggaaacggctggtaataccgcataagaccacgaagccgcatggctttgcggtaaaagatttatcgg

SEQ ID NO: 1868 - DNA, 225 bp, Unknown
  Encodes 16S rRNA from Acholeplasma
agagtttgatcctggctcaggatgaacgctggcggcgtgcctaatacatgcaagtcgaacggatcacttcggtgatcagtggcgaacgggtgagtaacacataaacaatctaccctgaagactgggataacggttggaaacgaccgctaataccggataggtgatcataaggcatcttgagatcattaaagttgggctgcaacactgcaggatgagtttatgtcg

SEQ ID NO: 1869 - DNA, 225 bp, Unknown
  Encodes 16S rRNA from Filomicrobium
agagtttgatcctggctcagaacgaacgctggcggcaggccttagatatgcaagttgaacggtctaaggtggagcttgctctactttagatagtagcggacgggtgagtaatacatgggaacgtaccctcttgtggggaatagcttttggaaacgaaaggtaataccgcataagccctacgggggaaaggagtaattcgcgagaggatcggcccatgccagatta

SEQ ID NO: 1870 - DNA, 225 bp, Unknown
  Encodes 16S rRNA from Clostridium III
agagtttgatcctggctcaggacgaacgctggcggcgtgcctaacacatgcaagtcgaacgagaagtgatgaaaagattccttcgggatgattagattcatggacagtggcggacgggcgagtaacgcgtgagtaacctgcccataagcgggggatagccgatggaaacgtcgagtaataccccatgacgtatatatatcgcatggtatatatatcaaagattta

SEQ ID NO: 1871 - DNA, 225 bp, Unknown
  Encodes 16S rRNA from Pseudoflavonifractor
agagtttgatcatggctcaggatgaacgctggcggcgtgcataacacattcaagtcgaacgaagcactttggacggatcccttcggggtgaagactgatttgacttagtggcggacgggtgagtaacgcgtgagcaacctgccttgaagagggggataacacagggaaacttgtgctaataccgcataacatacgtgaatcgcatggttcgtgtatcaaagctcc

SEQ ID NO: 1872 - DNA, 225 bp, Unknown
  Encodes 16S rRNA from Anaerophaga
agagtttgatcatggctcaggatgaacgctagcgacaggcttaacacatgcaagtcgaggggcagcgagtggcgttgttcgcaacgccatgtcggcgaccggcgcactggtgagtaacacgtatgcaacctgccctttaccggggcataacccttggaaacgaggcctaattccccatatacagcgcttgggcatccgggtgctgtgaaaggtttattccggtga

SEQ ID NO: 1873 - DNA, 225 bp, Unknown
  Encodes 16S rRNA from Lachnospiracea incertae sedis
agagtttgatcctggctcaggatgaacgctggcggcgtgcctaacacatgcaagtcgaacgaagctcctttgcggatctcttcggagtgaaggaaaggatgactgagtggcggacgggtgagtaacgcgtgggtaatctgccctgtacagggggacaacagttagaaatgactgctaataccgcatgagcgtacagcatcgcatgatgcagtgcgaaaaactgag

SEQ ID NO: 1874 - DNA, 225 bp, Unknown
  Encodes 16S rRNA from Asaccharobacter
agagtttgatcctggctcaggatgaacgctggcggcgtgcttaacacatgcaagtcgaacggttaagccgacttcggtcgggaatacagtggcgaacgggtgagtaacacgtgaccaacctgccccccgcaccgggacaacctccggaaacggaggctaataccggatatgcccgggcgcccgcatgggcggccggggaaagcccaggcggcgggggatggggtc

SEQ ID NO: 1875 - DNA, 225 bp, Unknown
  Encodes 16S rRNA from Kordia
agagtttgatcatggctcaggataaacgctagcggcaggcctaacacatgcaagtcgagcggcagcgtggatagcaatatctgacggcgagcggcggacgggtgagtaacgcgtatgcaacctacccactacacaaggatagccttccgaaaggaggattaatacttgatagtactctaagatggcatcaaaacagagttaaagatttatcggtagtggatgggc

SEQ ID NO: 1876 - DNA, 225 bp, Unknown
  Encodes 16S rRNA from Ruminococcus
agatttgatcatggctcaggacgaacgctggcggcacgcttaacacatgcaagtcgaacgggactaagagagaagcttgcttcacttttagtttagtggcggacgggtgagtaacacgtgagtaacctgcccttatcaggggaatagcctccggaaacggagagtaataccgcataagatgacagtacggcatcgtacagtcataaaagattttatcggataagg

SEQ ID NO: 1877 - DNA, 225 bp, Unknown
  Encodes 16S rRNA from Clostridium III
agagtttgatcctggctcaggacgaacgctggcggcgtgcctaacacatgcaagtcgaacgagaaatgatgatttgattccttcgggatgaaaagaatcatggacagtggcggacgggcgagtaacgcgtgagtaacctgcccataagagagggatagccgatggaaacgtcgagtaatacctcatattgtaattaattcgcatggattgattatgaaagattta

SEQ ID NO: 1878 - DNA, 225 bp, Unknown
  Encodes 16S rRNA from Ethanoligenens
agagtttgatcatggctcaggataaacgctggcggcgtgcataacacattcaagtcgaacggaactgtacggattaatccttcgggaagcgtttgtacagtttagtggcggacgggtgagtaacgcgtgagcaacctgcctacgagaggggaataacgtctggaaacggacgctaataccgcataaaccgcggggttcgcatggactccggggcaaagatttatc

SEQ ID NO: 1879 - DNA, 225 bp, Unknown
  Encodes 16S rRNA from Clostridium XlVa
agagtttgatcctggctcaggatgaacgctggcggcgtgcctaacacatgcaagtcgaacggagatgtccaatgggctgcttcggcagtccgggcatcttagtggcggacgggtgagtaacgcgtggagaacctggcccatgcagggggataacagcgggaaaccgctgctaataccgcataagcgccgaggggggcatcccttttggtggaaagcgtaagcggc

SEQ ID NO: 1880 - DNA, 225 bp, Unknown
  Encodes 16S rRNA from Barnesiella
agagtttgatcatggctcaggatgaacgctagcgacaggcctaacacatgcaagtcgaggggcagcacggtgtagcaatacactggtggcgaccggcgcacgggtgcgtaacaggtatgcaatctgtcccataccggggcatagcccgctgaaaggcggattaattctccatgtgtcatgagagggcatccttttatgatgaaacgtaagggtatgggatgagca

SEQ ID NO: 1881 - DNA, 225 bp, Unknown
  Encodes 16S rRNA from Eubacterium
agagtttgatcatggctcaggatgaacgctggcggcgtgcctaacacatgcaagtcgagcgagaatcttcggaaggaatcttcggaggacggaaggagaggaaagcggcggacgggtgagtaacgcgtaggtaacctgccctgtacagagggatagccactggaaacggtgattaataccttataaaactgagtattcacatggagattcagtcaaagatttatc

SEQ ID NO: 1882 - DNA, 225 bp, Unknown
  Encodes 16S rRNA from Prevotella
agagtttgatcctggctcaggatgaacgctagctacaggcttaacacatgcaagtcgaggggcagcatggaggttgcttgcaacttctgatggcgaccggcgcacgggtgagtaacgcgtatccgaccttcccccaggtagggaacagcccggcgaaagtcggattaatgccctatagtctgcgaattgcgcatgttgtttgcagtaaagattgatcgccttggg

SEQ ID NO: 1883 - DNA, 225 bp, Unknown
  Encodes 16S rRNA from Anaerophaga
agagtttgatcatggctcaggatgaacgctggcggcgtgcttaacacatgcaagtcgaggggcagcatgggaggtggcaacaccacccgatggcgaccggcgcactggtgagtaacacgtatgcaacctgccccctacagggggataatccagagaaatttggtctaataccccgtagtcagcgagagggcatcctcttgctgggagagctccggcggtagggga

SEQ ID NO: 1884 - DNA, 225 bp, Unknown
  Encodes 16S rRNA from Acetitomaculum
agagtttgatcctggctcaggatgaacgctggcggcgtgcctaacacatgcaagtcgaacggggatgcctcgccgttgaagcttcggcagagacatgagacatcctagtggcggacgggtgagtaacgcgtgggcaacctgccctgtactgggggatagcagctggaaacggctggtaataccgcataagcgcgcggcatcgcatggtgctgcgtgaaaagccga

SEQ ID NO: 1885 - DNA, 225 bp, Unknown
  Encodes 16S rRNA from Prevotella
agagtttgatcctggctcaggatgaacgctggcggcgtgcctaacacatgcaagtcgaggggcagcatgaaggttgcttgcaacctttgatggcgaccggcggatgggtgcgtaacgcgtatccaacctgcctgtgtcccgggcatagcccgtggaaacgcggattaactcccgatggtgcagcggtgccgcatggcgttgctgccaaatgtaaaggacacagat

SEQ ID NO: 1886 - DNA, 225 bp, Unknown
  Encodes 16S rRNA from Clostridium III
agagtttgatcctggctcaggacgaacgctggcggcgtgcctaacacatgcaagtcgaacgagaaatgatgatttgattctttcgggatgaaatgattcatggacagtggcggacgggcgagtaacgcgtgagtaacctgcccataagagagggatagccgatggaaacgtcgagtaataccacatattgtagtaagatcgcatggttttgctatgaaagattta

SEQ ID NO: 1887 - DNA, 225 bp, Unknown
  Encodes 16S rRNA from Marinoscillum
agagtttgatcatggctcaggatgaacgctggcggcaggcttaatacatgcaagtcgaacggtaaggcctgatgtagcaatacagagggtacacgagtggcgcacgggtgcgtaacgcgtatgtaatctgcctgcaaccgggacaaaacagttggaaacggctgctaatatcccatggtcaatttttcaggcatctgggagattgtaaagatttattggttgcag

SEQ ID NO: 1888 - DNA, 225 bp, Unknown
  Encodes 16S rRNA from Pedobacter
agagtttgatcctggctcaggatgaacgctagcggcaggcctaatacatgcaagtcgaacggtaaagtccccttcgggggattgagagtggcggacgggtgcgtaacgcgtatgcaaccaacccccctcaccgggatagccggtggaaacgccggataagaccggatgcgccggcggggaggcatctccctgtcggcaaggcggcgacgcggagggggacgggca

SEQ ID NO: 1889 - DNA, 225 bp, Unknown
  Encodes 16S rRNA from Prevotella
agagtttgatcctggctcaggatgaacgctagctacaggcttaacacatgcaagtcgaggggcagcatgaatcaagcttgcttgatttgatggcgaccggcgcacgggtgcgtaacgcgtatccaacctacccgtcactcagggatagccttgcgaaagtaagattaatacctgatggtctccttccggggcatcccggttggagtaaagattcatcggtggcgg

SEQ ID NO: 1890 - DNA, 225 bp, Unknown
  Encodes 16S rRNA from Prevotella
agagtttgatcatggctcaggatgaacgctagctacaggcttaacacatgcaagtcgaggggcatcatgggggttgtttacaatccctgatggcgaccggcgcacgggtgagtaacgcgtatccaacctgccttcgagtcagggataaccttccgaaagggagcctaatacctgatgcagtgcgaagatggcatcagatttgcactaaagcttttgcgctcgggg

SEQ ID NO: 1891 - DNA, 225 bp, Unknown
  Encodes 16S rRNA from Anaerovorax
agagtttgatcctggctcaggatgaacgctggcggcgtgcctaacacatgcaagtcgagcgagaagcttttcagtcgattcttcggaaaagacagagaagtggaaagcggcggacgggtgagtaacgcgtaggcaacctgccccttgcagagggatagcctcgggaaaccgggattaaaacctcataatgcatccacatgacatcttgaggatgccaaagattta

SEQ ID NO: 1892 - DNA, 225 bp, Unknown
  Encodes 16S rRNA from Clostridium XlVa
agagtttgatcatggctcaggatgaacgctggcggcgtgcttaatacatgcaagtcgaacgaagcgccctgtacagatttcttcggaatgaagttttgggtgacttagtggcggacgggtgagtaacgcgtgggtaacctgcctcatgcagggggacaacagctggaaacggctgctaataccgcataagcgcacgagatcgcatgatcaagtgtgaaaagattt

SEQ ID NO: 1893 - DNA, 225 bp, Unknown
  Encodes 16S rRNA from Clostridium IV
agagtttgatcctggctcaggatgaacgctggcggcgtgcataacacattcaagtcgaacgaagcactggcgaggaagtcttcggatggaattgcctttgacttagtggcggacgggtgagtaacgcgtgagcaaccttcctggtagtgagggataacacagggaaacttgtgctaataccgcatgacgcactgaggtcgcatggttttagtgccaaagatttat

SEQ ID NO: 1894 - DNA, 225 bp, Unknown
  Encodes 16S rRNA from Lachnospiracea incertae sedis
agagtttgatcctggctcaggatgaacgctggcggcgcgcttaacacatgcaagtcgaacggaatgattggcttcggtcatgaattcagtggcgaacgggtgagtaacacgtggataacttgccttttagtgggggatagctgagagaaatctcaattaataccgcataatgtaatctattcgcatgaatagattaataaagatgaaaatcgctaaaagataggt

SEQ ID NO: 1895 - DNA, 225 bp, Unknown
  Encodes 16S rRNA from Clostridium sensu stricto
agagtttgatcctggctcaggacgaacgctggcggcatgcctaacacatgcaagtcgaacgggataagtttggttgtagcgatacttttgaacttattcagtggcgaacgggtgagtaacacgtgagcaacctgccttttacacagggataacagttggaaacgactgctaataccggataagaccacactgaggcatctcagaggggtcaaagcgattcagcgg

SEQ ID NO: 1896 - DNA, 225 bp, Unknown
  Encodes 16S rRNA from Lishizhenia
agagtttgatcctggctcaggatgaacgctagcggcaggcctaacacatgcaagtcgaggggcagcgcgaggtagcaataccttggcggcgaccggcggacgggtgcgtaacgcgtatggaaccaacccgtcacagggggacaagccagggaaacttggtctaataccccatactactgttaaatcgcatggtatgacagtgaaagcttacgggcggtgacggac

SEQ ID NO: 1897 - DNA, 225 bp, Unknown
  Encodes 16S rRNA from Pedobacter
agagtttgatcctggctcaggatgaacgctagcggcaggcctaatacatgcaagtcgtacgggatctccccttcgggggagtgagagtggcgcacgggtgcgtaacgcgtatgcaaccaaccctcatccgggggacagccggtggaaacgccgggtaataccccatatccactttgggaggcatcttctgaggtggaaaggctttggtcggaggaggacgggcat

SEQ ID NO: 1898 - DNA, 225 bp, Unknown
  Encodes 16S rRNA from Howardella
agagtttgatcatggctcaggagaaacgctggcggcgcacataagacatgcaagtcgaacggaacttagattgatgtttacattgaactaagtttagtggcggactggtgagtaacacgtgagcaacctgccctttagagggggataacattgagaaatcagtgctaataccgcataacgcaattcttccgcatgaaagaattgccaaaggagaaatccgcttaa

SEQ ID NO: 1899 - DNA, 225 bp, Unknown
  Encodes 16S rRNA from Roseburia
agagtttgatcctggctcaggatgaacgctggcggcgtgcttaacacatgcaagtcgaacggactttactgaaaagagggcttgcccaatggaaggtaaagttagtggcggacgggtgagtaacgcgtgggcaacctgccttacacagggggacaacagttggaaacgactgctaataccgcataagccggtagtgccgcatggcacatccggaaaagattgtat

SEQ ID NO: 1900 - DNA, 225 bp, Unknown
  Encodes 16S rRNA from Clostridium XlVa
agagtttgatcatggctcaggatgaacgctggcggcgtgcttaatacatgcaagtcgaacggggatgtccacccgatgaagccagagtgcttgcacaaaggccgattcaaccgggcatcctagtggcggacgggtgagtaacgcgtgggtaacctgcctcatactggggaataacagtcagaaatgactgctaataccgcataagcgcacagtgccgcatggcac

SEQ ID NO: 1901 - DNA, 225 bp, Unknown
  Encodes 16S rRNA from Anaerovorax
agagtttgatcatggctcaggatgaacgctggcggcgtgcctaacacatgcaagtcgagcgggaaatattgaaatgaaacttcggtagattttcgatatggagagcggcggacgggtgagtaacgcgtaggcaacctgcccctggcagagggatagccactggaaacggtgattaaaacctcataacgcgcagatgctgcatagcaactgcgccaaagatttatc

SEQ ID NO: 1902 - DNA, 225 bp, Unknown
  Encodes 16S rRNA from Lentisphaera
agagtttgatcatggctcagaatgaacgctggcggcatggattaggcatgcaagtcgaacggcagggcagcgatgcccgagagtggcgaaagggtgagcaacgcgtggggaacctgcccccgggaccggaacaagcctgtgaaaacgggtctgaaaccggatgaagccccgcaccgcatggtgcggcggcgaaatattcatagcccggggagggccccgcgtccc

SEQ ID NO: 1903 - DNA, 225 bp, Unknown
  Encodes 16S rRNA from Prevotella
agagtttgatcatggctcagattgaacgctggcggcaggcttaacacatgcaagtcgaggggcagcatgggaggtggcaacaccacccgatggcgaccggcgcactggtgagtaacacgtatgcaacctgccccctacagggggataatccagagaaatttggtctaataccccgtagtcagcgagagggcatcctcttgctgggagagctccggcggtagggga

SEQ ID NO: 1904 - DNA, 225 bp, Unknown
  Encodes 16S rRNA from Saccharofermentans
agagtttgatcctggctcagaacgaacgctggcggcgcgtcttaagcatgcaagtcgagcgggaataagggagcttgcttccttatgagagcggcggactggtgaggtaacggcccaccaaacctacgatcggtagccgaactgagaggttgatcggccacattgggactgagacacggcccagactcctacgggaggcagcagtggggaatattgggcaatggg

SEQ ID NO: 1905 - DNA, 225 bp, Unknown
  Encodes 16S rRNA from unknown taxa
agagtttgatcctggctcaggacgaacgctggcggtgtgcctcatacatgcaagtcgaacgagaagctgacttcggttagtggaaagtggcggacgggtgagtacaacataggaaatctgccccaaagcgggggacaacagagggaaacttctgctaataccccatacgagcttagttgaaatactaatcttgaaagatttatcactttgggatgagcctgtgcc

SEQ ID NO: 1906 - DNA, 225 bp, Unknown
  Encodes 16S rRNA from Proteiniphilum
agagtttgatcatggctcaggatgaacgctagcgacaggcttaacacatgcaagtcgaggggcagcatgggcgtggcaacacgcctgatggcgaccggcgcactggtgagtaacacgtatgcgacctgcctccttcagggggataacccagagaaatttggcctaataccccatagtccgcgcggctgcatggccgtgcggggaaagcctcggcggaaggagatg

SEQ ID NO: 1907 - DNA, 225 bp, Unknown
  Encodes 16S rRNA from Schwartzia
agagtttgatcctggctcaggacgaacgctggcggcgtgcttaacacatgcaagtcgaacgaggcgatttgaaagcttgcttttgatgagcctagtggcaaacgggtgagtaacgcgtaggcaacctgccctcaggatggggacaacggcccgaaaggaccgctaataccgaatgacgtatcgggaccgcatgatcctgataccaaaggcggagcaatccgtcac

SEQ ID NO: 1908 - DNA, 225 bp, Unknown
  Encodes 16S rRNA from Anaerorhabdus
agagtttgatcatggctcaggatgaacgctggcggcgtgcttaatacatgcaagtcgaacgaacaaaatcagaaagcttgctttttgatctagttagtggcgaacgggtgagtaatacgtaggcaacctacctcaaagagggggatagcagttggaaacgactattaataccgcataggtaatgaaggggcatccctacattattaaaggtgcgtttgcaccgct

SEQ ID NO: 1909 - DNA, 225 bp, Unknown
  Encodes 16S rRNA from Robinsoniella
agagtttgatcctggctcaggatgaacgctggcggcgtgcctaacacatgcaagtcgagcgatgaataaaccgacaaggtttcggccaaggaagtttattcagagcggcggatgggtgaggaacgcgtggggaacctgcctttcaccgggggataccagctggaaacggctgttaataccgcatatgctcacagtgccgcatggcacagggaggaaaactccggg

SEQ ID NO: 1910 - DNA, 225 bp, Unknown
  Encodes 16S rRNA from Clostridium IV
agagtttgatcatggctcaggacgaacgctggcggcgtgcctaacacatgcaagtcgaacggagtgttgcgctgaaattgagattagcttgctaaaggatatttcttgtaacacttagtggcggacgggtgagtaacgcgtgagtaacctgccttacagagggggacaacagttggaaacgactgctaataccgcataaagttttttgtaggcatctataagaaa

SEQ ID NO: 1911 - DNA, 225 bp, Unknown
  Encodes 16S rRNA from Erysipelotrichaceae incertae sedis
agagtttgatcatggctcaggatgaacgctggcggcatgcctaagacatgcaagtcgaacgaagtgtcccgttgaagtttggagtgcttgcacaaaaaatggatacggattcgcacttagtggcagacgggtgagtaacacgtgggtaatctacctcggagactgggataactattagaaatgatagctaataccggataattcgtaatcggataactgattatg

SEQ ID NO: 1912 - DNA, 225 bp, Unknown
  Encodes 16S rRNA from Flavobacterium
agagtttgatcatggctcaggatgaacgctagcggcaggcttaacacatgcaagtcgaggggcagcggggcgtagcaatacgccgccggcgaccggcgcacgggtgcgtaacgcgtatgcaacccacccgcaacaggggtataacggagtgaaaattccactaatcccccatatggtttggggaccgcatggtttcctaacgaaagcttatttgtggttgcggac

SEQ ID NO: 1913 - DNA, 225 bp, Unknown
  Encodes 16S rRNA from Pedobacter
agagtttgatcatggctcaggatgaacgctagcggcaggcctaatacatgcaagtcgaacgggaagggtccttcggggccctgagagtggcgcacgggtgcgtaacgcgtatgcaaccaacccctttccgggggacagccggtggaaacgccgggtaataccccatgtcgacgaaggaggacatcctctttcgttgaaagacttcggtcggagagggacgggcat

SEQ ID NO: 1914 - DNA, 225 bp, Unknown
  Encodes 16S rRNA from Clostridium III
agagtttgatcatggctcaggacgaacgctggcggcgtgcctaacacatgcaagtcgaacgagaaatatgacaatgaatccttcgggatgatttggattatggacagtggcggacgggcgagtaacgcgtgagtaacctgcccataagagagggatagccgatggaaacgtcgagtaataccacatattgtagttaattcgcatggattgattatgaaagattta

SEQ ID NO: 1915 - DNA, 225 bp, Unknown
  Encodes 16S rRNA from Selenomonas
agagtttgatcatggctcaggacgaacgctggcggcgtgcttaacacatgcaagtcgaacgagacgattgaaagcttgcttttgaaagtcgagtggcaaacgggtgagtaacgcgtagacaacctgccgcaaagatggggacaacagtccgaaaggactgctaataccgaatgttgtatcgtttccgcatggagatgatattaaagatggcctctacttgtaagc

SEQ ID NO: 1916 - DNA, 225 bp, Unknown
  Encodes 16S rRNA from Rhizobium
agagtttgatcctggctcagaacgaacgctggcggcaggcttaacacatgcaagtcgagcgccccgcaaggggagcggcagacgggtgagtaacgcgtgggaatctaccgtaccctacggaataacgcatggaaacgtgtgctaataccgtatacgccctttgggggaaagatttatcggggtatgatgagcccgcgttggattagctagttggtggggtaaagg

SEQ ID NO: 1917 - DNA, 225 bp, Unknown
  Encodes 16S rRNA from Victivallis
agagtttgatcatggctcagaacgaacgctggcggcatggattaggcatgcaagtcgaacgaagcagcaatgcttagtggcggaagggtgaggaacgcgtgagtaatctgccctcaagttgggaataacaactggaaacggttgctaataccgaatgtggctgcaagaccgcatgattttgcagttaaagatttattgcttgaggatgagctcgcgtcccattag

SEQ ID NO: 1918 - DNA, 225 bp, Unknown
  Encodes 16S rRNA from Butyricimonas
agagtttgatcatggctcaggatgaacgctagcggcaggcttaacacatgcaagtcgaggggcagcgggtctagcaatagatgccggcgaccggcgaaagggtgagtaacgcgtgagcaacatacccttgacagggggataggcactggaaacggtgtgtaataccccgtaacacattccaccgcatgatgggatattgaaagattcattggtcaaggattggct

SEQ ID NO: 1919 - DNA, 225 bp, Unknown
  Encodes 16S rRNA from Parabacteroides
agagtttgatcctggctcaggatgaacgctagcgacaggcttaacacatgcaagtcgaggggcagcgggcgagtggcaacacttgctgtcggcgaccggcgcactggtgagtaacacgtatgcaacctgcccccttctgggagataacccatagaaatgtggcctaatatcccatagtcggcccagccgcatggccgggccgggaaaggcgagccggaaggggat

SEQ ID NO: 1920 - DNA, 225 bp, Unknown
  Encodes 16S rRNA from Adhaeribacter
agagtttgatcatggctcaggatgaacgctagcggcaggcctaatacatgcaagtcgaacggtaaacggtccttcgggactgtgagagtggcggacgggtgcgtaacgcgtatgcaaccaacccccgacgggcggacagccggtggaaacgccggataatacgccatggggcccagggagggcatcctttccgggccaaagcctcggcggtcggggacgggcatg

SEQ ID NO: 1921 - DNA, 225 bp, Unknown
  Encodes 16S rRNA from Eubacterium
agagtttgatcatggctcaggattaacgctggcggcgtgcctaacacatgcaagtcgagcgagaaacagtgaagagattcttcggatgaacagatctgtggacagcggcggacgggtgagtaacgcgtgggcaacctgcccctttccggaggatagccaagggaaactttgaataatactccataaagcatcattgccgcatgacagagatgccaaagatttatc

SEQ ID NO: 1922 - DNA, 225 bp, Unknown
  Encodes 16S rRNA from unknown taxa
agagtttgatcatggctcaggattaacgctggcggcgtgcctaatgcatgcaagtcgaacgtggtctcttcggagattaacgtggcggacgggtgaggaacacgtggggaacctgcccatcggtggggggtagcccgcggaaacgcggggtaattccgcatacggtctcctgggggtagctcaggagaggaaagggtcttcggactcgccgatggaggggcctgc

SEQ ID NO: 1923 - DNA, 225 bp, Unknown
  Encodes 16S rRNA from Treponema
agagtttgatcctggctcagaacgaacgctggcggcgcgttttaagcatgcaagtcgagcgggaatcgggggcaactccgaggagagcggcggacgggtgagtaacacgtggataatctatcttttagactgggatagcctggtgaaagtcaggataataccggataatacgtaatccgcacaagcggagaacgggaaaggagctaaggcttcgcttgaaggtga

SEQ ID NO: 1924 - DNA, 225 bp, Unknown
  Encodes 16S rRNA from Clostridium XlVa
agagtttgatcatggctcaggatgaacgctggcggcgtgcttaatacatgcaagtcgaacggaagatatcgggagcttgctcttgatatctttagtggcggacgggtgagtaacgcgtgggtaacctgcctcatacagggggataacagttagaaatgactgctaaaaccgcatgacatagtcaaaccgcatgatttgactatcaaatatttataggtatgagat

SEQ ID NO: 1925 - DNA, 225 bp, Unknown
  Encodes 16S rRNA from Clostridium XlVa
agagtttgatcctggctcaggacgaacgctggcggcgtgcctaacacatgcaagtcgaacgaggcgaggagtgcttgcacaccgaacctagtggcggacgggtgcgtaacgcgtgggtaacctgccctaaacagggggataacgtatagaaatgtacgctaataccgcataagctcacggaaccgcatggttttgagggaaaaggatttccggtttaggatgggc

SEQ ID NO: 1926 - DNA, 225 bp, Unknown
  Encodes 16S rRNA from Schwartzia
agagtttgatcatggctcaggacgaacgctggcggcgtgcttaacacatgcaagtcgaacggggcgatttgaaagcttgcttttgatgagcctagtggcaaacgggtgagtaacgcgtaggcaacctgccctcaggatggggacaacggcccgaaaggaccgctaataccgaatgacgtatcgggatcgcatgatactgataccaaaggcggagcaatccgtcac

SEQ ID NO: 1927 - DNA, 225 bp, Unknown
  Encodes 16S rRNA from Prevotella
agagtttgatcctggctcaggatgaacgctagctacaggcttaacacatgcaagtcgaggggcagcatgggagttgcttgcaattcccgatggcgaccggcggatgggtgagtaacgcgtatccaacctgtcccgcgcgcggggacagcccttggaaatgaggattaacccccgatacgccatggggccgcatggtcccctggtgaacctttgcgcgggttgggg

SEQ ID NO: 1928 - DNA, 225 bp, Unknown
  Encodes 16S rRNA from Selenomonas
agagtttgatcatggctcagattgaacgctggcggcgtgcttaacacatgcaagtcgaacgagacgatttagaagcttgcttttattgagtcgagtggcaaacgggtgagtaacgcgtagacaacctgccgcaaagatggggacaacagtccgaaaggactgctaataccgaatgttgtatctcctccgcatggaagagatattaaagatggcctctacttgtaa

SEQ ID NO: 1929 - DNA, 225 bp, Unknown
  Encodes 16S rRNA from Beijerinckia
agagtttgatcatggctcagaacgaacgctggcggcaggcttaacacatgcaagttgaacgggatccttaagatagcttgctatattaaggtgagagtagcgcacgggtgagtaacacgtgggaacataccttatagtgtgggataacaattggaaacgattgataataccgcataagccctgagggggaaaggaggaattcgctataagattggcccgcggaag

SEQ ID NO: 1930 - DNA, 225 bp, Unknown
  Encodes 16S rRNA from Eubacterium
agagtttgatcctggctcaggacgaacgctggcggcgtgcttaacacatgcaagtcgaacgaagcttgattgatgattacttcggtatgatttatgatatgactgagtggcggacgggtgagtaacgcgtgagtaacctgcctcttggagggggatagtgtttggaaacgaacagtaataccgcataacgtgcagagaaggcatcttttttgtaccaaagattta

SEQ ID NO: 1931 - DNA, 225 bp, Unknown
  Encodes 16S rRNA from Adhaeribacter
agagtttgatcatggctcaggatgaacgctggcggcaggcttaatacatgcaagtcgaacggtaacgaccggtagcaatactggggcgacgagtggcgcacgggtgcgtaacgcgtatgcaacctgccctcaaccgggacataacgtcgagaaattggcgctaatatcccatgtgtatgcgaggcggcatcgtcttacatataaagattcattggttgaggatgg

SEQ ID NO: 1932 - DNA, 225 bp, Unknown
  Encodes 16S rRNA from unknown taxa
agagtttgatcatggctcagaacgaacgctggtagcgtggattaggcatgcaagtcgaacgggatccgggagatagcaatatttcctggtgagagtggcggaagggcgaggaacacgtgaacaacctgtccatcaggtggggaaaaccgttggaaacgacggctaataccgaatgtggcgtcgtgacacatgtcatgaacgctaaagggggcccgcaagggctct

SEQ ID NO: 1933 - DNA, 225 bp, Unknown
  Encodes 16S rRNA from Desulfobulbus
agagtttgatcctggctcagaacgaacgctggcggcgtgcttaacacatgcaagtcgaacgcgaaagcggcttcggtcgtgagtagagtggcgcacgggtgagtaacgcgtagataacctgtcttcatatctgggataacacgccgaaaggggtactaataccggatatactcgcatttcaataggtgaggcgagaaaaggtggcctctggttcaagctactgta

SEQ ID NO: 1934 - DNA, 225 bp, Unknown
  Encodes 16S rRNA from Bacteroides
agagtttgatcctggctcaggatgaacactagctacaggcttaacacatgcaagtcgaggggcagcattaagtcagcttgctgatttagatggcgaccggcgcacgggtgagtaacgcgtatccaacctgccccctacccggggatagccttgcgaaagtaagattaatacccggtgcagttatgattccgcatgggaatataacgaaagattcatcggtggggg

SEQ ID NO: 1935 - DNA, 225 bp, Unknown; identical to SEQ ID NO: 742
  Encodes 16S rRNA from Rummeliibacillus

SEQ ID NO: 1936 - DNA, 224 bp, Unknown
  Encodes 16S rRNA from Agarivorans
agagtttgatcatggctcagattgaacgctggcggcaggcttaacacatgcaagtcattgcacaatgggggaaaccctgatgcagccatgccgcgtgtgtgaagaaggccttcgggttgtaaagcacttttgcattcgaggaagacagcgtataaataaatgcgctatttgacgttagagtgtgaataagcaccggcaaactccgtgccagcagccgcggtaat

SEQ ID NO: 1937 - DNA, 225 bp, Unknown
  Encodes 16S rRNA from Clostridium XlVa
agagtttgatcctggctcaggatgaacgctggcggcgtgcctaacacatgcaagtcgaacggagatttggcgctgacgagtgaagtagcttgctatggaacaaatcttgccaaagcttagtggcggacgggtgagtaacgcgtggacaacctggcccatacagggggacagcagctggaaacggctgataataccgcataagcgcacagtatcacatggtacagt

SEQ ID NO: 1938 - DNA, 225 bp, Unknown
  Encodes 16S rRNA from Selenomonas
agagtttgatcctggctcaggacgaacgctggcggcgtgcttaacacatgcaagtcgaacggggctattagaagcttgcttttaagagcctagtggcaaacgggtgagtaacgcgtaggcaacctgcctctaagatggggacaacagtccgaaaggactgctaataccgaatgacgtaagtatctcgcatgggaaacttaccaaagatggcctctgcttgtaagc

SEQ ID NO: 1939 - DNA, 225 bp, Unknown
  Encodes 16S rRNA from unknown taxa
agagtttgatcctggctcagaacgaacgctggtagcgtggattaggcatgcaagtcgaacgggatcaggaaggcagcaatgtcggcctgtgagagtggcggaagggcgaggaacacgtgagcaacctgtccttgaggtggggaaaactccgggaaactggagctaataccgaatgtggcgccgggagacatcttccgagcgctaaagggggccgaaaggctctcc

SEQ ID NO: 1940 - DNA, 225 bp, Unknown
  Encodes 16S rRNA from Prevotella
agagtttgatcctggctcaggatgaacgctagcggcaggcttaacacatgcaagtcgaggggcagcgggtccagcaatggatgccggcgaccggcgaaagggtgagtaacgcgtgagcaacgtgcccgtctgagggggatagtcattggaaacgatgcgtaataccccgtaacaacatttaccgcatggtgggtgtttgaaagatttattgcagacggatcggct

SEQ ID NO: 1941 - DNA, 225 bp, Unknown
  Encodes 16S rRNA from Spirochaeta
agagtttgatcctggctcagaacgaacgctggcggcgcgttttaagcatgcaagtcgagcggtaagccggagcaatccggtgtagagcggcggacgggtgagtaacacgtggataatctggcctttagttcgggatagcctggtgaaagtcaggataataccggatacgacgcttatggcacaagcgataagcgggaaaggagccaaggctttgctgaaggatga

SEQ ID NO: 1942 - DNA, 225 bp, Unknown
  Encodes 16S rRNA from Selenomonas
agagtttgatcatggctcaggacgaacgctggcggcgtgcttaacacatgcaagtcgaacggggcgattagaagcttgcttttatgagcctagtggcaaacgggtgagtaacgcgtaggcaacctgcctctaagatggggacaacagtccgaaaggactgctaataccgaatgttgtaagtaactcgcatgagagacttaccaaagatggcctctacttgtaagc

SEQ ID NO: 1943 - DNA, 225 bp, Unknown
  Encodes 16S rRNA from Spiroplasma
agagtttgatcctggctcaggatgaacgctggcggcatgcctaagacatgcaagtcgaacgaggtggcccattgaaggtggagtgcttgcacgaagctggatatggattcccacctagtggcagacgggtgagtaacacgtgggttacctacctctttgttggggataacagttggaaacgattgctaataccgaataagatactcgtattgaaaggagctttca

SEQ ID NO: 1944 - DNA, 225 bp, Unknown
  Encodes 16S rRNA from Pedobacter
agagtttgatcatggctcaggatgaacgctagcggcaggcctaatacatgcaagtcgtacgggagtcccccttcggggggatgagagtggcggacgggtgcgtaacgcgtatgcaacccacccctgtcagccggatagccttgggaaaccgggggtaacacggcatgttcccgcgtgggggcatccccatacgggcaaagcggcgacgcggacggggacgggcat

SEQ ID NO: 1945 - DNA, 225 bp, Unknown
  Encodes 16S rRNA from Clostridium XlVa
agagtttgatcctggctcaggatgaacgctggcggcgtgcttaatacatgcaagtcgaacgaagcactttccccggactttttcggaacgaagggggttgtgacttagtggcggacgggtgagtaacgcgtggataacctgccccatgcagggggacaacagctggaaacggctgctaataccgcataagcgcacagtgaggcatctcacggtgtgaaaagattt

SEQ ID NO: 1946 - DNA, 225 bp, Unknown
  Encodes 16S rRNA from unknown taxa
agagtttgatcatggctcaggacgaacgctggcggcgtgcttcatacatgcaagtcgaacgagaaattgccttcgggcaatggacagtggcggacgggtgagtaatgtgtagagaatctgccctatagtgggggatagcagttggaaacgactattaataccccatatgcgcgtagttgcgatactattcgtgaaagatttatcgctataggatgagtctgcatc

SEQ ID NO: 1947 - DNA, 225 bp, Unknown
  Encodes 16S rRNA from Lactobacillus
agagtttgatcctggctcaggacgaacgctggcggcgtgcctaatacatgcaagtcgaacgcaatcttttaacaatgagtgcttgcactcagcgttttaagtgcgagtggcgaacgggtgagtaacacgtgggcaatctgcccaaaagagggggataacacttggaaacaggtgctaataccgcataaaccaactgatcgcatgatcggttgggcaaagatggtg

SEQ ID NO: 1948 - DNA, 225 bp, Unknown
  Encodes 16S rRNA from Clostridium XlVa
agagtttgatcatggctcaggatgaacgctggcggcgtgcctaacacatgcaagtcgaacggggtacagacgctgtgcggagaagtgcttgcacggaaccaaacttgtttgtacttagtggcggacgggtgagtaacgcgtggagaacctgcctcacacagggggataacagggagaaattcctgctaataccgcataagcgcacgacatggcatcatgaagtgt

SEQ ID NO: 1949 - DNA, 225 bp, Unknown
  Encodes 16S rRNA from Prevotella
agagtttgatcatggctcaggatgaacgctggcggcgtgcctaacacatgcaagtcgaggggcagcatgtaggttgcttgcaacctatgatggcgaccggcgcacgggtgcgtaacgcgtatccaaccttccccgcagtagggtgcagcccgttgaaagacggattaatcccctatgttgtccattgacggcatccgatttggacgaaagatttcatcgctgcgg

SEQ ID NO: 1950 - DNA, 225 bp, Unknown
  Encodes 16S rRNA from Prevotella
agagtttgatcctggctcaggatgaacgctagcgacaggcttaacacatgcaagtcgaggggtaacatgaagaaagcttgctttctttgatgacgaccggcgcacgggtgagtatcgcgtatccaacctgcccataagtagggaatagccttgcgaaagtaagattaatgccctatggtttccgccaaagacatctgagatggaataaagatttatcgcttatgg

SEQ ID NO: 1951 - DNA, 154 bp, Unknown
  Encodes 16S rRNA from Marinobacter
agagtttgatcctggctcagattgaacgctggcggcaggcttaacacatgcaagtcgtacggtaacagaggaagacagcgtataaataaatgcgctatttgacgttagagtgtgaataagcaccggcaaactccgtgccagcagccgcggtaat

SEQ ID NO: 1952 - DNA, 225 bp, Unknown
  Encodes 16S rRNA from Butyricimonas
agagtttgatcctggctcaggatgaacgctagcggcaggcttaacacatgcaagtcgaggggcatcgcggagtagcaatactctggcggcgaccggcggaagggtgcgtaacgcgtgagcaacttgcccgtcactgtgggataggcactggaaacggtgtgtaataccacgtaacacagcggtccgcatggacggttgttgaaagatccgttggtgacggatagg

SEQ ID NO: 1953 - DNA, 225 bp, Unknown
  Encodes 16S rRNA from Prevotella
agagtttgatcatggctcaggatgaacgctagcggcaggcctaacacatgcaagtcgaggggcagcggggtagcaataccgccggcgaccggcgcacgggtgagtaacgcgtatgtaacctagttcacaaagagggatagccttccgaaagggagattaataccacatatgatgatagcttcgcatggagcagtcatgaaaaatttattgatgtgaaatggacat

SEQ ID NO: 1954 - DNA, 225 bp, Unknown
  Encodes 16S rRNA from Dongia
agagtttgatcctggctcagaacgaacgctggcggcacgcttaacacatgcaagtcggacgggtggaagttagtttactgatggaagctagtggcggactggtgagtataatacaggaatatgcccttaggtatgggatagctttgggaaactggaggtaataccgtatgaggtcgagagaggaaagcaggaatgcgcctgaggattagcctgtatctgattagg

SEQ ID NO: 1955 - DNA, 225 bp, Unknown
  Encodes 16S rRNA from Anaerovorax
agagtttgatcatggctcaggatgaacgctggcggcgtgcctaacacatgcaagtcgagcgggattcttacgaatggagattcgtcgaagtaagtaagatgatagcggcggacgggtgagtaacgcgtaggtaacctacccccggctgcgggatagcctagggaaacctggattaataccgcatgatgcgttgaagtcacatggctttaacgccaaagatttatc

SEQ ID NO: 1956 - DNA, 225 bp, Unknown
  Encodes 16S rRNA from Butyricimonas
agagtttgatcctggctcaggatgaacgctagcggcaggcttaacacatgcaagtcgaggggcagcgcggagtagcaatactctggcggcgaccggcggaagggtgcgtaacgcgtgagcaacttgcccgtcactgtgggataggcactggaaacggtgtgtaataccacgtaacacatttgctcgcatgggtagatgttgaaaggtttaccggtgacggatggg

SEQ ID NO: 1957 - DNA, 225 bp, Unknown
  Encodes 16S rRNA from Cryptanaerobacter
agagtttgatcatggctcaggacgaacgctggcggcatgcctaacacatgcaagtcgaacggaataagaatggctgtagcgatactttcgttcttatttagtggcgaacgggtgagtaacacgtgagcaacctgccttctacacagggataacagttggaaacgactgctaataccggataagaccacactgaggcatctcagaggggtcaaagcgcttagcggt

SEQ ID NO: 1958 - DNA, 225 bp, Unknown
  Encodes 16S rRNA from Papillibacter
agagtttgatcatggctcaggatgaacgctggcggcgtgcataacacattcaagtcgaacgaagcacagttgatgaagtcttcggatggaattggctatgacttagtggcggacgggtgagtaacgcgtgagcaaccttcctggtagtgagggataacacagggaaacttgtgctaataccgcatgacgcatagacatcgcatggtgactatgccaaagacaagt

SEQ ID NO: 1959 - DNA, 225 bp, Unknown
  Encodes 16S rRNA from Clostridium sensu stricto
agagtttgatcatggctcaggacgaacgctggcggtgtgcttaatacatgcaagtcgagcggacttgcgggggcttgctcccgcaagttagcggcggacgggtgagtaacgcgcgagcaacctgcctatatctggggaataacacagagaaatttgtgctaataccgcataagaccacagtggggcatcccacaggggtaaaagatttatcggatatagatgggc

SEQ ID NO: 1960 - DNA, 225 bp, Unknown
  Encodes 16S rRNA from Escherichia/Shigella
agagtttgatcctggctcagattgaacgctggcggcaggcctaacacatgcaagtcgaacggtaacaggaaacagcttgctgtttcgctgacgagtggcggacgggtgagtaatgtctgggaaactgcctgatggagggggataactactggaaacggtagctaataccgcataacgtcgcaagaccaaagagggggaccctcgggcctcttgccatcggatgtg

SEQ ID NO: 1961 - DNA, 225 bp, Unknown
  Encodes 16S rRNA from Butyricicoccus
agagtttgatcatggctcaggataaacgctggcggcgcacataagacatgcaagtcgaacggaagccgtgcgagagacaattgaagatttatctgattgagtctcacgcacaatgactttagtggcggactggtgagtaacacgtaagcaatctgcctatcagaggggaataacagtgagaaatcattgctaataccgcatatgctcacagcatcgcatgatgca

SEQ ID NO: 1962 - DNA, 225 bp, Unknown
  Encodes 16S rRNA from Prevotella
agagtttgatcatggctcaggatgaacgctagctacaggcttaacacatgcaagtcgaggggcagcatggttgttgcttgcaacaactgatggcgaccggcgcacgggtgagtaacgcgtatccaaccttcccccaagtagggaatagcccggcgaaagtcggattaatgccctatgttttccttggatggcatctgatgaggaacaaagacttgtcgcttgggg

SEQ ID NO: 1963 - DNA, 225 bp, Unknown
  Encodes 16S rRNA from Lachnospiracea incertae sedis
agagtttgatcctggctcaggatgaacgctggcggcgtgcttaacacatgcaagtcgaacggggaaacatatttgaagatttcggttggaagatatgttttctagtggcggacgggtgagtaacgcgtaaacaatctgccttagagagggggataacagatagaaatatttgctaataccgcataagaccacagctaggcatctagcaggggtaaaaggaggaat

SEQ ID NO: 1964 - DNA, 225 bp, Unknown
  Encodes 16S rRNA from Thermotalea
agagtttgatcctggctcaggatgaacgctggcggcgtgcctaacacatgcaagtcgagcgagaagcttcggagtagattcttcggatgacacactgaagtggacagcggcggacgggtgagtaacgcgtgggcaacctgcccctttccggaggatagccaagggaaactttgaataatactccataaagcagtgacatcacatggtgatactgccaaagattta

SEQ ID NO: 1965 - DNA, 225 bp, Unknown
  Encodes 16S rRNA from Cohaesibacter
agagtttgatcatggctcagaacgaacgctggcggcaggcttaacacatgcaagtcgaacggaacataggtagcttgctatctatgtcagtggcgcacgggtgagtaacgcgtaggaacctgtcttttagcctgggatagcctctggaaacggagggtaaaaccggatgagccctgagggggaaatgagtaatcagctggaagaggggcctgcgttagattaggc

SEQ ID NO: 1966 - DNA, 225 bp, Unknown
  Encodes 16S rRNA from Clostridium XVIII
agagtttgatcatggctcaggatgaacgctggcggcgtgcctaatacatgcaagtcgaacgaggattcattgatggagcttgctccggatttgaattcgagtggcgaacgggtgagtaatacatgaataatctaccccttagtctgggataccaatctgaaaagattgctaataccggataggcaattctggggcatctcggaattattaaagatgggtttccat

SEQ ID NO: 1967 - DNA, 225 bp, Unknown
  Encodes 16S rRNA from Lachnospiracea incertae sedis
agagtttgatcctggctcaggatgaacgctggcggcgtgcttaacacatgcaagtcgaacggacttttctcgctgaaaaaggaaggtgcttgcaccggagagtttcttgagggaagttagtggcggacgggtgagtaacgcgtgggtaacctgcctatcacagggggataacagttggaaacgactgctaataccgcataagcgcacggtatcgcatgatacagt

SEQ ID NO: 1968 - DNA, 225 bp, Unknown
  Encodes 16S rRNA from Spirochaeta
agagtttgatcatggctcagaacgaacgctggcggcgcgtcttaagcatgcaagtcgggcggcaagctgccttcgggcagcctagagcggcggactggtgagtaacgcgtgggtgacgcacccccttgacggggacagcccgcagaaatgcggggtaataccggataaggtcctcggggttggagcccggggaggaaaggagctattgctccgcgaggggagcgg

SEQ ID NO: 1969 - DNA, 225 bp, Unknown
  Encodes 16S rRNA from Clostridium XlVa
agagtttgatcctggctcaggatgaacgctggcggcgtgcttaacacatgcaagtcgaacgaagcactaaggatgagaccttcgggtggaattcttagtgacttagtggcggacgggtgagtaacgcgtgggtaacctgccccatacagggggataacagttggaaacgactgctaagaccgcataacaagggagtaccgcatgacacttccttcaaagatttat

SEQ ID NO: 1970 - DNA, 225 bp, Unknown
  Encodes 16S rRNA from Hydrogenoanaerobacterium
agagtttgatcatggctcaggagaaacgctggcggcgcacataagacatgcaagtcgaacggaatttagccgaatgtttacatgaggcgaagatttagtggcggacgggtgagtaacacgtgagcaacctgcctttaggagggggataacattgagaaatcagtgctaataccgcataatgcataagcttcgcatgaagcctatgccaaaggagtaatccaccta

SEQ ID NO: 1971 - DNA, 225 bp, Unknown
  Encodes 16S rRNA from Clostridium IV
agagtttgatcctggctcaggacgaacgctggcggcgtgcctaacacatgcaagtcgaacggagatattttgaatgaagacttcggttggatttcgatttatcttagtggcggacgggtgagtaacgcgtgagtaacctgcctttttgagggggataacatcgggaaatcgatgctaataccgcataatattcaagattcgcatggattttgaatcaaaggagca

SEQ ID NO: 1972 - DNA, 225 bp, Unknown
  Encodes 16S rRNA from Papillibacter
agagtttgatcctggctcaggatgaacgctggcggcgtgcataacacattcaagtcgaacgaagcactttgacggaagtcttcggacggaagttgatttgacttagtggcggacgggtgagtaacgcgtgagcaaccttcctggtagtgagggataacacagggaaacttgtgctaataccgcatgacgcatggatatcgcatggtatatatgccaaagacttgt

SEQ ID NO: 1973 - DNA, 225 bp, Unknown
  Encodes 16S rRNA from Sporosarcina
agagtttgatcatggctcaggatgaacgctggcggcatgcctaagacatgcaagtcgtacgaagcggcccactgacttatattgatacattgagagcttgctcgatttgaggatttataatgacgtggattttccgcttagtggcaaacgggtgagtaacacgtgggttacctgcctctatgttggggataccaattggaaacgattgttaataccgaatatgat

SEQ ID NO: 1974 - DNA, 225 bp, Unknown
  Encodes 16S rRNA from Selenomonas
agagtttgatcctggctcaggacgaacgctggcggcgtgcttaacacatgcaagtcgaacgagacgattgaaagcttgcttttgaaagtcgagtggcaaacgggtgagtaacgcgtagacaacctgccgcaaagatggggacaacagtccgaaaggactgctaataccgaatgttgtcatttctcccgcatgggagactgattaaagatggcctctacttgtaag

SEQ ID NO: 1975 - DNA, 225 bp, Unknown
  Encodes 16S rRNA from Papillibacter
agagtttgatcatggctcaggataaacgctggcggcgcacataagacatgcaagtcgaacggaccaaattagtttgtttacaaattgaagaggttagtggcggactggtgagtaatatgtaagcaatctgcctgttagagtggaacaacagtgagaaatcactgctaataccgcatatgccatagatgtcacatgacaacagtgggaaaggagcaatccgctaac

SEQ ID NO: 1976 - DNA, 187 bp, Unknown
  Encodes 16S rRNA from Lachnospiracea incertae sedis
agagtttgatcatggctcaggataaacgctggcggcgtgcttaattggacaatgggggaaaccctgatccagcgacgccgcgtgaacgaagaagtatctcggtatgtaaagttctatcagcagggaagataatgacggtacctgactaagaagcaccggctaaatacgtgccagcagccgcggtaat

SEQ ID NO: 1977 - DNA, 225 bp, Unknown
  Encodes 16S rRNA from Clostridium XlVa
agagtttgatcctggctcaggatgaacgctggcggcgtgcttaacacatgcaagtcgaacgaggtatagaagagaagttttcggatggatcttttataccgagtggcggacgggtgagtaacgcgtggagaacctgccccatacagggggataccaattagaaatgattgttaataccgcataagcgcacactgaggcatctcagagtgtgaaaagctccggcgg

SEQ ID NO: 1978 - DNA, 225 bp, Unknown
  Encodes 16S rRNA from Saccharofermentans
agagtttgatcatggctcaggacgaacgctggcggcgtgcctaacacatgcaagtcgagcgaggacaacggcttcggctgttgttcgagcggcggacgggtgagtaacgcgtgaacaatctgtccctgacagggggataacacttggaaacaggtgctaataccgcataagaccacgtgaccgcatggtcgaggggtcaaaggagcaatccggtgaggggtgagt

SEQ ID NO: 1979 - DNA, 225 bp, Unknown
  Encodes 16S rRNA from Clostridium IV
agagtttgatcatggctcaggacgaacgctggcggcgtgcctaacacatgcaagtcgaacggagttaaacgctgaatggatggtagcttgctactggaaattcttgtttaacttagtggcggacgggtgagtaacgcgtgagcaacctgcctttcagagggggataacggctggaaacggtcgctaataccgcataacgtatatttaaggcatcttagatatacc

SEQ ID NO: 1980 - DNA, 225 bp, Unknown
  Encodes 16S rRNA from Lachnospiracea incertae sedis
agagtttgatcctggctcaggatgaacgctggcggcgtgcttaatacatgcaagtcgaacgaagcatgttgacggaatcccctcggggaggaagatgacatgacttagtggcggacgggtgagtaacgcgtgggcaatctgccctgtacagggggacaacagttggaaacgactgctaataccgcataagcgcacgatgaccgcatggtcaggtgtgaaaaggag

SEQ ID NO: 1981 - DNA, 225 bp, Unknown
  Encodes 16S rRNA from Clostridium IV
agagtttgatcctggctcaggagaaacgctggcggcgcacataagacatgcaagtcgaacggaacttagtcgaatgtttacatgagacaaaagtttagtggcggacgggtgagtaacacgtgagcaacctgcctttaagagggggataacattgagaaatcagtgctaataccgcataacgcatttctaccgcatgatagaaatagccaaaggagaaatccgctt

SEQ ID NO: 1982 - DNA, 225 bp, Unknown
  Encodes 16S rRNA from Lachnospiracea incertae sedis
agagtttgatcatggctcaggatgaacgctggcggcgtgcctaacacatgcaagtcgaacggggtgtcagctcttcggaacggacacttagtggcggacgggtgagtaacgcgtgggtaacctgcctcatacagggggatagcagttggaaacgactgataataccgcataagcgcacagtatcgcatggtacagtgtgaaaaactccggtggtatgagatggac

SEQ ID NO: 1983 - DNA, 225 bp, Unknown
  Encodes 16S rRNA from Desulfotomaculum
agagtttgatcatggctcaggactaacgctggcggcgtgcctaacacatgcaagtcgaacgattcattttttgtagcaatatagaagatggagagtggcgcacgggtgagtaacacatagatgatctgcctttcagactgggacaactcagggaaacttgagctaataccagataagaccccatgaagggattcacgtgatcaaagggggagcaatctcctgctg

SEQ ID NO: 1984 - DNA, 225 bp, Unknown
  Encodes 16S rRNA from Pedobacter
agagtttgatcatggctcaggatgaacgctagcggcaggcctaatacatgcaagtcgaacgggaagggtccttcggggccctgagagtggcgcacgggtgcgtaacgcgtatgcaaccaacccctttccgggggacagccggtggaaacgccgggtaataccccatgtcgatccatttgggcatccaagaggattgaaagatttcggtcggagagggacgggcat

SEQ ID NO: 1985 - DNA, 225 bp, Unknown
  Encodes 16S rRNA from Anaeroplasma
agagtttgatcatggctcaggattaacgctggcggcgtgcctaatacatgcaagtcgaatggttagcttgctaaccatggcgaacgggtgagtaacacgtaggcaacctgacgtaaagccgaggataaccattggaaacgatggataatactggataggacatttggaggcatctttggatgtttaaagatttatcactttacgaggggcctgcggcgcattagc

SEQ ID NO: 1986 - DNA, 225 bp, Unknown
  Encodes 16S rRNA from Clostridium IV
agagtttgatcctggctcaggacgaacgctggcggcgtgcttaacacatgcaagtcgaacgagaatccgtggaaagagatttcggtcaatggaagcggaggaaagtggcggacgggtgagtaacgcgtgaggaacctgccttggagagggggacaacagccggaaacggctgctaataccgcatgacgcacagaggggacatccccattgtgccaaagatttatc

SEQ ID NO: 1987 - DNA, 225 bp, Unknown
  Encodes 16S rRNA from Treponema
agagtttgatcatggctcagaacgaacgctggcggcgcgtcttaagcatgcaagtcgggcgggattcatgtgcttgcacatgatgagagcggcggactggcgaggagcgcgtgggtgacgcacccctcggacggggacagccggcagaaatgccgggtgataccggatgaggtcccccttgtcggaggagggggaggaaaggggcttcggccccgccgggggagc

SEQ ID NO: 1988 - DNA, 225 bp, Unknown
  Encodes 16S rRNA from Mogibacterium
agagtttgatcctggctcaggatgaacgctggcggcgtgcctaatacatgcaagtcgagcgagatactttcaaatgagacttcggtggattttggaggttgaaagcggcggacgggtgagtaacgcgtaggcaacctgccctttgcacagggatagccattggaaacgatgattaatacctgataacgcgggagcgatgcatatcgcttccgtcaaagattcatc

SEQ ID NO: 1989 - DNA, 225 bp, Unknown
  ITS sequence of Candida pararugos
tcctccgcttattgatatgcttaagttcagcgggtgatcttacttgatatgaggtcaaaatttgataattttccacagcttgtgtctaacaactgtgtataatctttttcagtccatatagtgaaccattacccactaatatatatgtggagaaaaaatgacgctcacacaagtatacctccaaagaggtgcaatgtgcgttcaaaaactcaatgattcacgtct

SEQ ID NO: 1990 - DNA, 225 bp, Unknown
  ITS sequence of Dipodascaceae s
tcctccgcttattgatatgcttaagttcagcgggtaatcctacttgatctgaggttgaatagtgttgtttttcaaacgaatttgattcgaaattttagaagagcaaagcaattccaagagagaaacaacgctcaaacaagtatactttgggggataccccaaagtgcaatgtgcgttcaaaaactgatgattcacttctgcaattcacaagaaatatcgcgtttc

SEQ ID NO: 1991 - DNA, 225 bp, Unknown
  ITS sequence of Orpinomyces sp AF CTS CHO
tcctccgcttattgatatgcttaagttcagcgggtactcttatctgatttgagatcaagttatttttaaattaaattttccttttaaattaagcaacaattaatattttaatttttaccctttaaaactgaaaagtttattcctttttacgggaaaattttatccaattttattagataaaaaccaaaaaaaattggcttttaaaaatcaatttaaagtgaaaca

SEQ ID NO: 1992 - DNA, 225 bp, Unknown
  ITS sequence of Candida catenulat
tcctccgcttattgatatgcttaagttcagcgggtagtcttacgtgtgtgagggaaaaagtatggttgtgagtaaactgtaatactacaccaatcactttttggaggaacagctgacgccgtatgtccattacctgcgagggagataaccgctcacacacgcatgcccgcgggaatacccacgggcgcaatgtgcgttcaaagattcgatgattcacaaaatctg

SEQ ID NO: 1993 - DNA, 225 bp, Unknown
  ITS sequence of Aspergillus cibariu
tcctccgcttattgatatgcttaagttcagcgggtatccctacctgatccgaggtcaacctggttaaaaagattggttgcgaggctagctgccagctggacctacgggagcgggtgacaaagccccatacgctcgaggaccagacatggtgccgccactgccttttgggcccgtccccgttgccagggacggaagcccaacacacaagccgtgcttgagggcagc

SEQ ID NO: 1994 - DNA, 225 bp, Unknown
  ITS sequence of Candida etchellsi
tcctccgcttattgatatgcttaagttcggcgggtaatcttgcttgattgggggccataaaaaatattactgcacagagttattaacgtgtgctgttccatttctttgactccaataaggagcaacacctcgtaatccacaagaagtagattagagagaaagttcggcgctccaacaagcatgctactaggagatcctagaagcgcaatgtgcgttcaaagattc

SEQ ID NO: 1995 - DNA, 225 bp, Unknown
  ITS sequence of Anaeromyces sp K
tcctccgcttattgatatgcttaagttcagcgggtactcttatctgatttgagatcaagttgttttaaaaaatttcctttttgttttgaatatgaaaaggtatttttaaaattgtctaggttattccttggaaaaggaaaattttatccaattttaaaaattgaaattttcaaatccaatttaaaaattcaatttaaagtgaaacaacttgtatcgttgtaaaac

SEQ ID NO: 1996 - DNA, 225 bp, Unknown
  ITS sequence of Cladosporium sp 4 MU 201
tcctccgcttattgatatgcttaagttcagcgggtatccctacctgatccgaggtcaaccttagaaatggggttgttttacggcgtagcctcccgaacaccctttagcgaatagtttccacaacgcttaggggacagaagacccagccggtcgatttgaggcacgcggcggaccgcgttgcccaataccaagcgaggcttgagtggtgaaatgacgctcgaacag

SEQ ID NO: 1997 - DNA, 225 bp, Unknown
  ITS sequence of Wallemia seb
tcctccgcttattgatatgcttaagttcagcgggtaatcccatctgatttgaggtcgatttgatcaggttgtttgccaaaaattggcagttagaagcaatcactacaaattactaaggcgagattactctctgactggtgatggatgtaatccattataacacacagtattaacccattcataaggtcatcactaatcattttaaagggagtcattatacatgac

SEQ ID NO: 1998 - DNA, 225 bp, Unknown
  ITS sequence of Orpinomyces sp AF CTS CHO
tcctccgcttattgatatgcttaagttcagcgggtactcttatctgatttgagatcaagttatttgaaataaatttccttttgctattgaatttttaatttcagattaaaaaattgtcaagtttattccttttttacgggaaaattttatccaattttttaaaaattgaaaataaaaaaacaattttaaaattcaatttaaagtgaaacaacttgtatcgttgta

SEQ ID NO: 1999 - DNA, 225 bp, Unknown
  ITS sequence of Orpinomyces sp AF CTS CHO
tcctccgcttattgatatgcttaagttcagcgggtactcttatctgatttgagatcaagttatttaaaataaatttccttttcttgaaaaatttattttcgctttttaaaactgtcaaggttattcctttttacgggaaaattttatccaattttaaaaaattgaaaataaaattttacaatttaaaaattcaatttaaagtgaaacaacttgtatcgttgtaaa

SEQ ID NO: 2000 - DNA, 225 bp, Unknown
  ITS sequence of Kodamaea ohmer
tcctccgcttattgatatgcttaagttcagcgggtagtcctacttgatttgaggaaaaaaaatgagtgtactgacggtaccgttttgtagagtactgtcgtcattattttcgtgcaaacacaatacaatccgtgaggattagggaagtattcgctcaaacaagcataccattgggaatacccaatggtgcaatgtgcgttcaaagattcgatgattccgagagct

SEQ ID NO: 2001 - DNA, 225 bp, Unknown
  ITS sequence of Pichia burtoni
tcctccgcttattgatatgcttaagttcagcgggtagtcctacctgatttgaggaaaatgtgtttttagtgtggttgtcactactaaattagaaaataacaacacaagaaaaatacttttcgaatggactgactaagagctcgtgccattcaacgccaacccgcgggggttgagggagaaatgacgctcaaacaggcataccttgtggaataccacaaggtgcaa

SEQ ID NO: 2002 - DNA, 225 bp, Unknown
  ITS sequence of Pachyphloeus carneu
tcctccgcttattgatatgcttaagttaagggagtcctcttacaagtttcaagtctttcttaaaatacagtttataatattttccttttataatttaaaaatgttactttttaatttattaaagtacttatattactttctgttttttggattttacttttgtaaaatctttctttttattttatattattttttaagggacgttgaaacttatatacatcgatc

SEQ ID NO: 2003 - DNA, 225 bp, Unknown
  ITS sequence of Anaeromyces sp FFEX
tcctccgcttattgatatgcttaagttcagcgggtactcttatctgatttgagatcaagttatttgaaataaatttccttttgctattggattttattctctttcaaaaaattgtcaaggttattccttttttacgggaaaattttatccaattttttaaaaattgaaaataaaaaacaattttaaaattcaatttaaagtgaaacaacttgtatcgttgtaaaa

SEQ ID NO: 2004 - DNA, 225 bp, Unknown
  ITS sequence of Trichosporon asteroide
tcctccgcttattgatatgcttaagttcagcgggtagtcctacctgatttcaggccagagtcaaagtaattgtccttgcggacgattagaagcacgcttcaacacaatggacccagtgaaacttattacaccagacattaatgtcaaacttgctaactcttttaaggcgagcgatcagagatcgcagacgcccaaatccaatccattaggaaaccctagtggttg

SEQ ID NO: 2005 - DNA, 225 bp, Unknown
  ITS sequence of Rhizophydium sp MP 00
tcctccgcttattgatatgcttaagttaagagagtcatcttaaaaatttcaaatctttttttaacttttgaatttacttttgattttactcttaataaattcttttttataatcaattgttttaattgatttattataatttattttattttaaaaagaggatattgaaacttttatatttaattaaagctaattaaatactttcatgcattcaaatatttactt

SEQ ID NO: 2006 - DNA, 225 bp, Unknown
  ITS sequence of Vrystaatia aloeicol
tcctccgcttattgatatgcttaagttaagagagtcatcttgaaaatttcaaatcttttttaaatcgtttgaccttttcattttttacgtgattagatcaattcttattcaattaatcaattgctttaattgatttattaaatatgttattttaaaattgggatgttgaaactttcatatttaattgaagttcaattaaatactttcatgcattcaaatatttac

SEQ ID NO: 2007 - DNA, 225 bp, Unknown
  ITS sequence of Rhizophydium sp MP 00
tcctccgcttattgatatgcttaagttaagagagtcatcttaaaaatttcaaatctttttttaacttttgaatttacttttttgattttactcttaaaaaataaattcttttattttataatcaattgttttaattgatttattataatttattttattttaaaaagaggatattgaaacttttatatttaattaaagctaattaaatactttcatgcattcaaa

SEQ ID NO: 2008 - DNA, 225 bp, Unknown
  ITS sequence of Ascomycota s
tcctccgcttattgatatgcttaagttcagcgggtatccctacctgatccgaggtcaacctggaaaaaatggttggaaaacgtcggcaggcgccggccaatcctacagagcatgtgacaaagccccatacgctcgaggatcggacgcggtgccgccgctgcctttcgggcccgtccccccggagagggggacggcgacccaacacacaagccgggcttgagggca

SEQ ID NO: 2009 - DNA, 225 bp, Unknown
  ITS sequence of Wallemia seb
tcctccgcttattgatatgcttaagttcagcgggtaatcccatctgatttgaggtcgatttgatcagtttgtttgccaatggcagttagaagcaatcactacaaattactaaggcgagattactctctgactggtgatggatgtaatccattataacacacagtattaacccattcataaggtcatcactaattattttaaagggagtcattgtttatatgacaa

SEQ ID NO: 2010 - DNA, 225 bp, Unknown
  ITS sequence of Vrystaatia aloeicol
tcctccgcttattgatatgctcctctaccttgacatccgctaccttgataattttgctgttgttgtcttcttctatcttcttcttgtctacgtctatcttcttctcttctacgtctatcttcttcttctcttcttcgtctttcatcctcttgtcttcttctatcttgttcttgtctacgtctatcttcttcttgatgtcttctatcttcttctcggtgtcttcta

SEQ ID NO: 2011 - DNA, 225 bp, Unknown
  ITS sequence of Trichoderma virid
tcctccgcttattgatatgcttaaattcagcgggttcaacttattggaatcagagtaaatcgaggctgtcgttgatcttaattaggttccacgaaccgcttgcaccacaagattatcttgagcacttcatttattgtgtaattacatctactgaaatcaataacacgctcattgaggtgttttacatgtgttcagatgtgttcaaatgtcaatctaatgattgac

SEQ ID NO: 2012 - DNA, 225 bp, Unknown
  ITS sequence of Anaeromyces sp FFEX
tcctccgcttattgatatgcttaagttcagcgggtactcttatctgatttgagatcaagttatttaaataaatttccttttaataattggaattttttaatttcaattaatttaaaattgtcaaggttattcctttttacgggaaaattttatccaattttaaaaattgaattaaaaaaatacaatttaaaaattcaatttaaagtgaaacaacttgtatcgttg

SEQ ID NO: 2013 - DNA, 225 bp, Unknown
  ITS sequence of Anaeromyces sp FFEX
tcctccgcttattgatatgcttaagttcagcgggtactcttatctgatttgagatcaagttatttttaaataaatttccttttgctattgaattcttaatttcagcttaaaaaattgtcaaggttattcctttttacaggaaaattttatccaattttttaaaaattgaaaataaaaaaacaattttaaaattcaatttaaagtgaaacaacttgtatcgttgta

SEQ ID NO: 2014 - DNA, 225 bp, Unknown
  ITS sequence of Vrystaatia aloeicol
tcctccgcttattgatatgctcatgatattcctctttggaaatgctgccgttgcatggagcgtaacataagtcaatctggctgttcaagcatggaccatccattcttttgcaggttcttattctaaacaattgctttaggaacttaacggtttggcgaacagcagtaacatctgtaaaaggaccatagtatgaaccttttttgcctatatcccttgttacgactt

SEQ ID NO: 2015 - DNA, 225 bp, Unknown
  ITS sequence of Orpinomyces sp AF CTS CHO
tcctccgcttattgatatgcttaagttaagagagtcatcttaaaaatttcaaatcaaatttaaatatattaagttaatttttaaaaaatgttattttaaaattaactcgtttattatttaattaattgttttaattaattaattatatattttatttaatttttaaattgatgttgaaatttttatatttaattcaagatgaattaaatactttcatgcattcaa

SEQ ID NO: 2016 - DNA, 225 bp, Unknown
  ITS sequence of Candida glabrat
tcctccgcttattgatatgcttaagttcggcgggtaatcttatctggcttgatgttttatatattgttgatattgaaaatatgtttttctttaatatcaaaatcgttaaaacccacaagtgtatttgatgggtcaagcaacaaacaatcaaacagatataaagccgagtctcctttggctttgcaaaatgcgttcaaagattcgatgattcacagaataatgcac

SEQ ID NO: 2017 - DNA, 225 bp, Unknown
  ITS sequence of Neocallimastix s
tcctccgcttattgatatgcttaagttcagcgggtactcttatctgatttgagatcaagttatttaaataaatttccttttaaaatcgttcccaaccgacgatttcaattaaaatccatttaaagtgaaacaacttgtttatcgttgtaaaacactcataaccataaaatcaaatgattttatgagaatattttactgatactcaaacagacatacttttttagt

SEQ ID NO: 2018 - DNA, 225 bp, Unknown
  ITS sequence of Anaeromyces sp SSD BRL
tcctccgcttattgatatgcttaagttcagcgggtactcttatctgatttgagatcaagttgtttaaaaaatttcctttttgttttgaataagaaaactatttttaaaattgtctaggttattccttggaaaaggaaaattttatccaattttaaaaattgaaattttcaaatccaatttaaaaattcaatttaaagtgaaacaacttgtatcgttgtaaaacac

SEQ ID NO: 2019 - DNA, 225 bp, Unknown
  ITS sequence of Trichoderma virid
tcctccgcttattgatatgcaattttcaaggttcaacccgttcagcttcgctgaccggggcaagaatctcgatacttcgtatcttcgattcttgaaggtttccatcctgaccggtttcccagtctctttgaaaacccaacagtataacatctgagaggctgtcttgtgacaacccgcaagaattcaaactctgtttggattcttgcttcgaagctctgcttcgaa

SEQ ID NO: 2020 - DNA, 225 bp, Unknown
  ITS sequence of Candida glabrat
tcctccgcttattgatatgcttaagttcagcgggtagtcttacgggggggagaaacaaagtagtcgagaacgtgttttctgactgttgattctaaggcccggaggagaaaatgtatgctccaccccgcatgcgccggagcgcgccatgtgcgttcaaagattaatgattcacgtttgcagatcatgatacgtatcgcaatttgctgcgttcttcatcggtacgag

SEQ ID NO: 2021 - DNA, 225 bp, Unknown
  ITS sequence of Candida glabrat
tcctccgcttattgatatgcttaagttcagcgggtactcccatctgatttgagataagtttatagataggccagcgtaattatgtaattcacagtcccacttggattcaaacccactaaataaaaagataggtcaagttgtgttatgctcaaacagatgtacgacaaacgtcgtgcaagatgcgttcaaagattcgatgattcacagaataatgcaattcacatt

SEQ ID NO: 2022 - DNA, 225 bp, Unknown
  ITS sequence of Anaeromyces mucronatu
tcctccgcttattgatatgcttaagttcagcgggtactcttatctgatttgagatcaagttgtttaaaaaatttcctttttgttttgaataagaaaactatttttaaaattgtctaggttattccttgcttaaaggaaaattttatccaattttaaaaattgaaattttcaaatccaattaaaaattcaatttaaagtgaaacaacttgtatcgttgtaaaacac

SEQ ID NO: 2023 - DNA, 225 bp, Unknown
  ITS sequence of Phyllosticta capitalensi
tcctccgcttattgatatgccccttaccgcttcagctgctttaagctcccttaaaacaaactcaagcttttttatgtcaagaaaggccctttcgttacttccctgcgccgaacagaaggggcaatgccccgggcaatacattgtcgggcagattgaaagctgaagctttaaaggtcttttcttttccctgttcggagcaccgtttacggagcagtgataattctt

SEQ ID NO: 2024 - DNA, 225 bp, Unknown
  ITS sequence of Schizangiella serpenti
tcctccgcttattgatattcatatatcctatttgatgagatcaaagaacttaataattacttattttttctttctgtgatcttcttaatattattttattaaaaaataatacccaaatacattatctagttttcaaagaactatttctgagagaacaatctctcaaaactaagcaaaacgttatagctagatcttcttttctacaaatatactccatagaaagga

SEQ ID NO: 2025 - DNA, 225 bp, Unknown
  ITS sequence of Pleosporaceae s
tcctccgcttattgatatgcttaagttcagcgggtatccctacctgatccgaggtcaaaagttgaaaaaaggctttgtggatgctgaccttggctggaagagagcgcgacttgtgctgcgctccgaaaccagtaggccggctgccaattactttaaggcgagtctccagcgaactggagacaagacgcccaacaccaagcaaagcttgagggtacaaatgacgct

SEQ ID NO: 2026 - DNA, 225 bp, Unknown
  ITS sequence of Alternaria sp 3 MU 201
tcctccgcttattgatatgcttaagttcagcgggtatccctacctgatccgaggtcaaaagttgaaaaaaaggcttaatggatgctagacctttgctgatagagagtgcgacttgtgctgcgctccgaaaccagtaggccggctgccaattactttaaggcgagtctccagcaaagctagagacaagacgcccaacaccaagcaaagcttgagggtacaaatgac

SEQ ID NO: 2027 - DNA, 225 bp, Unknown
  ITS sequence of Penicillium brevicompactu
tcctccgcttattgatatgcttaagttcagcgggtatccctacctgatccgaggtcaacctggaaaaaagtttggttgatcggcaggcgccggccagtcctacaaagcgggtgacaaagccccatacgcttgaggaccggacgcggtgccgccgctgcctttcgggcccgtcccccggaaggaggacggagcccaacacacaagccgtgcttgagggcagcaatg

SEQ ID NO: 2028 - DNA, 225 bp, Unknown
  ITS sequence of Cryptococcus terrestri
tcctccgcttattgatatgcttaagttcagcgggtagccctacctgatttcaggtcaaagtcaaaagtgcgcgatggcaggttctgagcagtcatcaccacaaggagagacgaaacttattacgtctaacactgatgtgggatgttccactaagtcatttgaggcgagccatcactggcagacgcccaagtccaagtctaacatgttcagaaaacatattagatt

SEQ ID NO: 2029 - DNA, 225 bp, Unknown
  ITS sequence of Rhizophydium sp MP 00
tcctccgcttattgatatgcttaagttaagagagtcatcttaaaaatttcaaatcaaaataacatttttattgaatttttttatttattaaattcaattttaaatttttttcaattaattattttaattaatttattataatttgtgttatttttttttttaattgatgttgaaatttttatatttaattcaagttgaattaaatactttcatgcattcaaatat

SEQ ID NO: 2030 - DNA, 225 bp, Unknown
  ITS sequence of Monascus purpureu
tcctccgcttattgatatgcttaagttcagcgggtatccctacctgatccgaggtcaacctaaggaaaaaaaggttggagagggcaaaggccccggcccgacctactgagcgggtgacaaagccccatacgctcgaggaccggacgcggcgccgccactgcctttcgggcccgtcccccttgcccggaggcgcaggggacggcggcccaacacacaagccgcgct

SEQ ID NO: 2031 - DNA, 225 bp, Unknown
  ITS sequence of Saccharomycetales s
tcctccgcttattgatatgcttaagttcagcgggtattcctacctgatttgaggtcgagcttatgtattaagttcggcggccaagcgtcctactcatagttcgcttcgcccgcaacgtttcttttcagagcggccccaatgccagggcccccccatttctgctcgcaagcaagaaggaaacgacgctcaaacaggcatgccctccggaataccagagggcgcaat

SEQ ID NO: 2032 - DNA, 225 bp, Unknown
  ITS sequence of Cyllamyces aberensi
tcctccgcttattgatatgcttacgttcagcgggtactcttatctgatttgagatcaagttaatttttacttttttttcctttgtaagtacttttaaaaaatcaaactaattcattcttaaaattgtttaggttattccttttttacgggaaaattttatccaattttaaaaaaaatcagtttttaaatgattttttacaagacaaagaatttaaagtgaaacaa

SEQ ID NO: 2033 - DNA, 225 bp, Unknown
  ITS sequence of Microascaceae s
tcctccgcttattgatatgcttaagttcagcgggtaaccctacctgatccgaggtcaaaccatcaggagttgaggttcgacggctggccttcgccgggacccgatgcgaggtgagctaacttactacgcagggggcgccgcggcgggaccgccacttcatttcagggcctgcgggcaacggtggcccgcagcgccccaacaccgggcggcggcgcggcccacggt

SEQ ID NO: 2034 - DNA, 198 bp, Unknown
  ITS sequence of Orpinomyces sp AF CTS CHO
tcctccgcttattgatatgcttaagttcagcgggtactcttatctgatttgagatcaagttatttataaataaatttcctttaactgtacggtatggaaactattaaaatttctaaaaaactgaaatagctttattccttgttacgacttttacttcccctccgcttattgatatgccttgttacgacttttacttcc

SEQ ID NO: 2035 - DNA, 225 bp, Unknown
  ITS sequence of Trichoderma virid
tcctccgcttattgatatgcttaagttcagcaggtactcccatccgattcgatatgaaatatatttttcgatagagtcataaattcataagactcaatccttcctcatttcagatcaacattacatgagtgatcaaagtttggtcatactcgatcggatgtggaaagcttgcgctccccagcgtgtgcgttcaaaaattggatgattcacagtgtaattgtcatt

SEQ ID NO: 2036 - DNA, 225 bp, Unknown
  ITS sequence of Orpinomyces sp AF CTS CHO
tcctccgcttattgatatgcttaagttaagagagtcatcttaaaaatttcaaatcaaatttaaatatattaagttaatttttaaaaatgttattttaaaattaactcgtttatttatttaattaattgttttaattaattaattatatttattttttttatttttaaattgatgttgaaatttttatatttaattcaagatgaattaaatactttcatgcattca

SEQ ID NO: 2037 - DNA, 225 bp, Unknown
  ITS sequence of Rhizophydium sp MP 00
tcctccgcttattgatatgcttaagttaagagagtcatcttaaaaatttcaaatcaaaaattaaatatttatttgttttaaattaattttttaaataatttaaacaaattcatttatttcaattaattatattaattaatttattataattttatttttaattttttaattgatgttgaaatttttatatttaattctagtagaattaaatactttcatgcattc

SEQ ID NO: 2038 - DNA, 225 bp, Unknown
  ITS sequence of Piromyces sp I GRL 1
tcctccgcttattgatatgcttaagttcagcgggtactcttatctgatttgagatcaagttatttagttaaattttccttttaatgaaaaaatctaatcaaaaaattaaaattgtttaggttattccttttttacgggaaaattttatccaattttattttaaaattagaaaaattcaaattttaaaaaaaatttaaagtgaaacaacttgtatagttgtaaaac

SEQ ID NO: 2039 - DNA, 225 bp, Unknown
  ITS sequence of Paracoccidioides brasiliensi
tcctccgcttattgatatgcttaagttcagcgggtatccctacctgatccgaggtcgatttctagaatatgttaatattcaagtaaaaaaatcagaccggcgacggccgggccgcgtgagcgtactatgttgaaaaaaccccatatgctcgggcaccggagtcgcgacgccgccaatgcatttcaggcaaatccctacatatcaggatgagcccaacacacaagc

SEQ ID NO: 2040 - DNA, 225 bp, Unknown
  ITS sequence of Millerozyma farinos
tcctccgcttattgatatgcttaagttcagcgggtattcctacctgatttgaggtcaaactttgtagattgttgtaaggccgagcctcttttacacagatactaccgctaactgtttcaacgagttggttagacctaatacattgaagagtcaaacggcatttatctactgtaaatactcatgccaatccatttcaagcaaatagatactgaatatctatatcgc

SEQ ID NO: 2041 - DNA, 225 bp, Unknown
  ITS sequence of Trichoderma virid
tcctccgcttattgatatgcttaaattcagctggttcaaattattggaatcagagtaaatcgagactgtcgttgatcttaattagattccacgaaccgcttgcaccacaagactatcttgagtacttcatttcatgtgtaattaagactactgaaatcaataacacgctcattgaggtgttttacatgtgttcagagataaaagttcgaaagatcatagttcgct

SEQ ID NO: 2042 - DNA, 225 bp, Unknown
  ITS sequence of Debaryomyces prosopidi
tcctccgcttattgatatgcttaagttcagcgggtagtcctacctgatttgaggtcaaacttgtttgttatattgtaaggccgagcctagaataccgagaaatatacctttaaactattcaacgagttggataaacctaatacattgaaagtcatatagcactatccagtaccactcatgccaatacatttcaagcaaacgcctagttcgactaagagtatcact

SEQ ID NO: 2043 - DNA, 225 bp, Unknown
  ITS sequence of Vrystaatia aloeicol
tcctcgcttattgatatgcttaagttaagagagtcatcttgaaaatttcaaatcttttttaaattcttttgaccttttcagtttttacgtgattagatcaattcttattcaattaatcaattgctttaattgatttattaaatatgttattttaaaattgtgatgttgaaactttcatatttaattgaagttcaattaaatactttcatgcattcaaatatttac

SEQ ID NO: 2044 - DNA, 225 bp, Unknown
  ITS sequence of Cryptococcus albidu
tcctccgcttattgatatgcttaagttcagcgggtagtcctacctgatttgaggccagatgtcaagagtattaatccgaagatcaatggattagaaagcggtctttagtcctgcaacgcggccatccgaagatgtccttagcgaaatacttattacgccaagtcaaaccatgtcgcgagacagatccagctattacttttaagacgagccgacttatcatcggca

SEQ ID NO: 2045 - DNA, 225 bp, Unknown
  Encodes 16S rRNA from Succinivibrio
agagtttgatcatggctcagattgaacgctggcggcaggcctaatacatgcaagtcgaacggtaacagtagaaaagcttgcttttctagctgacgagtggcggacgggtgagtaacatttgggaaactacctgatagagggggacaacagttggaaacgactgctaataccgcataaagcctgagggtgaaagcagcaatgcgctatcagatgtgcccaaacggg

SEQ ID NO: 2046 - DNA, 225 bp, Unknown
  Encodes 16S rRNA from Prevotella
agagtttgatcatggctcaggatgaacgctagctacaggcttaacacatgcaagtcgaggggcagcatgaagtttgcttgcaaactttgatggcgaccggcgcacgggtgagtaacgcgtatccaaccttccctatactagaggatagcccggcgaaagtcggattaatactctatgttcttcgtagaagacatctgaaatgaagcaaaggtttaccggtatagg

SEQ ID NO: 2047 - DNA, 225 bp, Unknown
  Encodes 16S rRNA from Prevotella
agagtttgatcatggctcaggatgaacgctagctacaggcttaacacatgcaagtcgaggggcagcatgatcgaagcttgctttgattgatggcgaccggcgcacgggtgagtaacgcgtatccaaccttccctatagtagagaatagcccggcgaaagtcggattaatgctctatgttgtatttagaagacatctgaagaataccaaaggtttaccgctatagg

SEQ ID NO: 2048 - DNA, 225 bp, Unknown
  Encodes 16S rRNA from Prevotella
agagtttgatcctggctcaggatgaacgctagctacaggcttaacacatgcaagtcgaggggtaacgatattgaaagcttgctttcgataggcgacgaccggcgcacgggtgagtaacgcgtatccaacctgcccataactaagggataatccgtagaaatgcggtctaataccttatgtgttccgacgaggacatctgaattggaataaagatttatcggttat

SEQ ID NO: 2049 - DNA, 225 bp, Unknown
  Encodes 16S rRNA from Ruminobacter
agagtttgatcatggctcagattgaacgctggcggcaggcttaatacatgcaagtcgaacggtaacatgagaaagcttgctttcttgatgacgagtggcggacgggtgagtaatgcctgggaagctgcctgaatgagggggacaacacctggaaacgggtgctaataccgcgtataccctgagggggaaagaccggatacggtcacattcagatgcgcccaggtg

SEQ ID NO: 2050 - DNA, 225 bp, Unknown
  Encodes 16S rRNA from Syntrophococcus
agagtttgatcctggctcaggatgaacgctggcggcgtgcttaacacatgcaagtcgagcgaagcacagaaacggatttcttcggattgaaggttctgtgactgagcggcggacgggtgagtaacgcgtggggaacctgccctgtaccgggggataacagacagaaatgtctgctaataccgcataagcgcacgagaaggcatcttcttgtgtgaaaaactccgg

SEQ ID NO: 2051 - DNA, 225 bp, Unknown
  Encodes 16S rRNA from Succinivibrio
agagtttgatcatggctcagattgaacgctggcggcaggcctaatacatgcaagtcgaacggtaacataagaaagcttgctttcttgatgacgagtggcggacgggtgagtaatatttgggaagctacctgatagagggggacaacagttggaaacgactgctaataccgcatacagcctgagggtgaaagcagcaatgcgctatcagatgcgcccaaacgggat

SEQ ID NO: 2052 - DNA, 225 bp, Unknown
  Encodes 16S rRNA from Pseudobutyrivibrio
agagtttgatcatggctcaggatgaacgctggcggcgtgcttaacacatgcaagtcgaacgaagcaattttctacgatcccttcggggtgacggattattgactgagtggcggacgggtgagtaacgcgtgggtaacctaccttgtacagggggacaacagttggaaacgactgctaataccgcataagcgcacagcatcgcatgatgcagtgtgaaaagttttt

SEQ ID NO: 2053 - DNA, 225 bp, Unknown
  Encodes 16S rRNA from Prevotella
agagtttgatcatggctcaggatgaacgctagctacaggcttaacacatgcaagtcgaggggcagcataacgaaagcttgcttttgttgatggcgaccggcgcacgggtgagtaacgcgtatccaaccttccccatagtagagaatagcccggcgaaagtcggattaatgctctatgttgtatcatgaggacatctgaataataccaaaggttcaccgctatggg

SEQ ID NO: 2054 - DNA, 225 bp, Unknown
  Encodes 16S rRNA from Prevotella
agagtttgatcatggctcaggatgaacgctagctacaggcttaacacatgcaagtcgaggggcagcatgatcgaagcttgctttgattgatggcgaccggcgcacgggtgagtaacgcgtatccaaccttccctatagtagagaatagcccggtgaaaatcggattaatgctctatgttattcaatgcggacatctaagttgaatcaaaggtttaccgctatagg

SEQ ID NO: 2055 - DNA, 225 bp, Unknown
  Encodes 16S rRNA from Prevotella
agagtttgatcatggctcaggatgaacgctagctacaggcttaacacatgcaagtcgaggggtaacgacagcgaaagcttgcttttgctgggcgacgaccggcgcacgggtgagtaacgcgtatccaacctgcccataactaagggataatccgtagaaatgcggtctaataccttatgtgttccgacgaagacatctgaattggaataaagatttatcggttat

SEQ ID NO: 2056 - DNA, 225 bp, Unknown
  Encodes 16S rRNA from Prevotella
agagtttgatcatggctcaggatgaacgctagctacaggcttaacacatgcaagtcgaggggaaacgatattgaaagcttgctttctttaggcgtcgaccggcgaatgggtgagtaacgcgtatccaacctgcccctgagtaagggatagcccatcgaaagatggattaataccttatggtttcctttgaaggcatcagattaggaataaagatttatcgctgag

SEQ ID NO: 2057 - DNA, 225 bp, Unknown
  Encodes 16S rRNA from Lachnospiracea_incertae_sedis
agagtttgatcatggctcaggatgaacgctggcggcgtgcttaacacatgcaagtcgaacgaagtcttctagacagattccttcgggatgacgactagatgtacttagtggcggacgggtgagtaacgcgtgggtaacctgcctcatacagggggataacagttggaaacagctgctaataccccataagcgcacaatgtcgcatgacaaagtgtgaaaaactcc

SEQ ID NO: 2058 - DNA, 225 bp, Unknown
  Encodes 16S rRNA from Syntrophococcus
agagtttgatcatggctcaggatgaacgctggcggcgtgcttaacacatgcaagtcgagcgaagcacttgaatggatttcttcggattgaagttcttgtgacttagcggcggacgggtgagtaacgcgtgggaaacctgcctcatatcgggggataacagttggaaacgactgctaataccgcataagcgcacagtaccgcatggtacggtgtgaaaaactccgg

SEQ ID NO: 2059 - DNA, 225 bp, Unknown
  Encodes 16S rRNA from Ruminobacter
agagtttgatcatggctcagattgaacgctggcggcaggcttaatacatgcaagtcgaacggtaacagcaggaagcttgcttcctggctgacgagtggcggacgggtgagtaatacctggggagctgcctgaatgagggggacaacacctggaaacgggtgctaataccgcgtaagccctgagggggaaaggctgggcaaccagtcgcattcagatgcgcccagg

SEQ ID NO: 2060 - DNA, 225 bp, Unknown
  Encodes 16S rRNA from Butyrivibrio
agagtttgatcatggctcaggatgaacgctggcggcgtgcctaacacatgcaagtcgaacggagaatttacgctgatgaagcttcggcagattcttgtaaattcttagtggcggacgggtgagtaacgcgtgggcaacctgcctcatactgggggataacagctggaaacgactgttaataccgcataagcgcacggtatcgcatgatacagtgtgaaaaactcc

SEQ ID NO: 2061 - DNA, 225 bp, Unknown
  Encodes 16S rRNA from Clostridium_XlVa
agagtttgatcatggctcaggatgaacgctggcggcgtgcttaacacatgcaagtcgaacgaagcatttacttacgatctcttcggagtgacgagtttatgactgagtggcggacgggtgagtaacgcgtgggtaacctgccttgtacagggggataacagttagaaatgactgctaataccgcataagcgcacagtattgcatgatacagtgtgaaaaactccg

SEQ ID NO: 2062 - DNA, 225 bp, Unknown
  Encodes 16S rRNA from Prevotella
agagtttgatcctggctcaggatgaacgctagctacaggcttaacacatgcaagtcgaggggcagcataatcgaagcttgctttgattgatggcgaccggcgcacgggtgagtaacgcgtatccaaccttccccttagtagggcatagcccggcgaaagtcggattaataccctatgttatccgtcgaggacatctgaaatggattaaagatttatcgctaaggg

SEQ ID NO: 2063 - DNA, 225 bp, Unknown
  Encodes 16S rRNA from Prevotella
agagtttgatcatggctcaggatgaacgctagctacaggcttaacacatgcaagtcgaggggaaacgatattggaagcttgcttccgataggcgtcgaccggcgcacgggtgagtaacgcgtatccaacctgcccatcacttgggaataaccttgcgaaagtaagactaatgcccaatgacatttatagaaggcatctgaaatgaattaaagatttatcggtgat

SEQ ID NO: 2064 - DNA, 225 bp, Unknown
  Encodes 16S rRNA from Lachnospiracea_incertae_sedis
agagtttgatcatggctcaggatgaacgctggcggcgtgcttaacacatgcaagtcgaacggagtacttctcccgagactgaggaagcttgcttctgaagaatcatttgaagtacttagtggcggacgggtgagtaacgcgtgggtaacctgcctcacacagggggataacagttggaaacgactgttaataccgcataagcgcacagtatcgcatgatacagtg

SEQ ID NO: 2065 - DNA, 225 bp, Unknown
  Encodes 16S rRNA from Roseburia
agagtttgatcatggctcaggatgaacgctggcggcgtgcttaacacatgcaagtcgaacggacttatattgaaagtttcggccggatatataagttagtggcggacgggtgagtaacgcgtgggtaacctgccttacaccgggggataacagttggaaacgactgctaataccgcataagcccacagtaccgcatggtacagggggaaaagttgaggcgatgta

SEQ ID NO: 2066 - DNA, 225 bp, Unknown
  Encodes 16S rRNA from Lachnospiracea_incertae_sedis
agagtttgatcatggctcaggatgaacgctggcggcgtgcttaacacatgcaagtcgaacgaagcaacttatcacgattccttcgggatgacgatttgttgactgagtggcggacgggtgagtaacgcgtgggtaacctgccttatacagggggatagcagctggaaacggctgataataccgcataagcgcacagcatcgcatgatgcagtgtgaaaaactccg

SEQ ID NO: 2067 - DNA, 225 bp, Unknown
  Encodes 16S rRNA from Butyrivibrio
agagtttgatcctggctcaggatgaacgctggcggcgtgcctaacacatgcaagtcgaacggagtttaacgctgatgaagcttcggcagattcttgttaaacttagtggcggacgggtgagtaacgcgtgggtaacctgcctcatacagggggatagcagttggaaacgactgataacaccgcataagcgcacggtatcgcatgatacagtgtgaaaatatttat

SEQ ID NO: 2068 - DNA, 225 bp, Unknown
  Encodes 16S rRNA from Pseudobutyrivibrio
agagtttgatcatggctcaggatgaacgctggcggcgtgcttaacacatgcaagtcgaacgaagcagtttattacgatcccttcggggtgacgatttactgactgagtggcggacgggtgagtaacgcgtgggtaacctgccttgtacagggggacaacagttggaaacgactgctaataccgcataagcgcacagcttcgcatgaagcagtgtgaaaagtattt

SEQ ID NO: 2069 - DNA, 225 bp, Unknown
  Encodes 16S rRNA from Turicibacter
agagtttgatcatggctcaggatgaacgctggcggcgtgcctaatacatgcaagtcgaacgaggtgtagcaatacaccgagtggcgaacgggtgagtaacacgtaggtaacctgcccctaagtctgggatacccaggggaaaccttggctaataccggatagcggcggaggggacatcccttccgcacgaaagtcgcgtttgcgacgctttcggatggacctgcg

SEQ ID NO: 2070 - DNA, 225 bp, Unknown
  Encodes 16S rRNA from Lachnospiracea_incertae_sedis
agagtttgatcctggctcaggatgaacgctggcggcgtgcttaacacatgcaagtcgaacggagatttaccacctgcttgcaggaggtaaatcttagtggcggacgggtgagtaacgcgtgggtaacctgcctcacacagggggataacagttggaaacgactgttaataccgcataagcgcacggtatcgcatgatacagtgtgaaaaactccggtggtgtgag

SEQ ID NO: 2071 - DNA, 225 bp, Unknown
  Encodes 16S rRNA from Pseudobutyrivibrio
agagtttgatcctggctcaggatgaacgctggcggcgtgcttaacacatgcaagtcgaacgaagcaatttcttacgatcccttcggggtgacgagttattgactgagtggcggacgggtgagtaacgcgtgggtaacctaccttgtacagggggacaacagttggaaacgactgctaataccgcataagcgcacggtgttgcatgacacagtgtgaaaagttttt

SEQ ID NO: 2072 - DNA, 225 bp, Unknown
  Encodes 16S rRNA from Anaerolinea
agagtttgatcatggctcaggatgaacgctggcggcgtgcctaatacatgcaagtcggacggcagtagcaatactgtagtggcgaacgggtgagtaacacgttggtgacctgccccaaagatgggaatatcacctggaaacgggtggcaaaaccgaataagctcgtgtgagttagagaagcatgagtaaaagagcgatctactttgggaggggcctgcggcccat

SEQ ID NO: 2073 - DNA, 225 bp, Unknown
  Encodes 16S rRNA from Roseburia
agagtttgatcctggctcaggatgaacgctggcggcgtgcttaacacatgcaagtcgaacgaagcactttacttgatctcttcggagtgattgttctgtgactgagtggcggacgggtgagtaacgcgtgggtaacctgccttgtacaggggggataacagttggaaacgactgctaataccgcataagcgcacaggaccgcatggtccggtgtgaaaaactccg

SEQ ID NO: 2074 - DNA, 225 bp, Unknown
  Encodes 16S rRNA from Propionibacterium
agagtttgatcatggctcaggacgaacgctggcggcgtgcttaacacatgcaagtcgaacggaaaggccctgcttttgtggggtgctcgagtggcgaacgggtgagtaacacgtgagtaacctgcccttgactttgggataacttcaggaaactggggctaataccggataggagctcctgctgcatggtgggggttggaaagtttcggcggttggggatggact

SEQ ID NO: 2075 - DNA, 225 bp, Unknown
  Encodes 16S rRNA from Clostridium_XIVa
agagtttgatcatggctcaggatgaacgctggcggcgtgcttaacacatgcaagtcgaacgagccttgtcggacggatcccttcggggtgaagaccggcgctggcgagtggcggacgggtgagtaacgcgtggggaacctgcctcattccgggggataccagtcggaaacggctgttaataccgcataagcgcacggtgtggcatcacacagtgtgaaaaactcc

SEQ ID NO: 2076 - DNA, 225 bp, Unknown
  Encodes 16S rRNA from Olsenella
agagtttgatcatggctcaggatgaacgctggcggcgcgcctaacacatgcaagtcgaacggttaaagcacctccgggtgtgcataaagtggcgaacggctgagtaacacgtgggcaacctgcccctcgcaccgggacagcctcgggaaaccgtggataataccggatactccggcacccccgcatgggggagccgggaaagcccagacggcgagggatgggccc

SEQ ID NO: 2077 - DNA, 225 bp, Unknown
  Encodes 16S rRNA from Streptococcus
agagtttgatcctggctcaggacgaacgctggcggcgtgcctaatacatgcaagtggaacgcagtagtgatcaccggagcttgctccaccgattagtactgagtcgcgaacgggtgagtaacgcgtaggtaacctgccttgaagagggggataactattggaaacgatagctaataccgcataaaatagcgagttgcatgactggctattgaaaggtgcaatcgc

SEQ ID NO: 2078 - DNA, 225 bp, Unknown
  Encodes 16S rRNA from Clostridium_XlVa
agagtttgatcatggctcaggatgaacgctggcggcgtgcctaacacatgcaagtcgaacggagattagacgctgacgagacttcggtcaaatcttgtttaatcttagtggcggacgggtgagtaacgcgtgggcaacctgcctcatactgggggatagcagttggaaacgactgataataccgcataagcgcacgagatcgcatgatctagtgtgaaaaactcc

SEQ ID NO: 2079 - DNA, 225 bp, Unknown
  Encodes 16S rRNA from Clostridium_XlVa
agagtttgatcatggctcaggatgaacgctggcggcgtgcctaacacatgcaagtcgaacggagatttaacgctgatgaagcttcggcagaatcttgttaaatcttagtggcggacgggtgagtaacgcgtgggcaacctgcctcatactgggggatagcagttggaaacgactgataataccgcataagcgcacggagtcgcatgactctgtgtgaaaaactcc

SEQ ID NO: 2080 - DNA, 225 bp, Unknown
  Encodes 16S rRNA from Roseburia
agagtttgatcctggctcaggatgaacgctggcggcgtgcttaacacatgcaagtcgaacgggaattactttttagcttgctaagttgtaattctagtggcggacgggtgagtaacgcgtgggtaacctgccttataccgggggacaacagttggaaacgactgctaataccgcataagcgcacagtctcgcatgagacggtgtgaaaaactccggtggtataag

SEQ ID NO: 2081 - DNA, 225 bp, Unknown
  Encodes 16S rRNA from Clostridium_IV
agagtttgatcatggctcaggacgaacgctggcggcgtgcctaacacatgcaagtcgaacggagatatgtcgaatgaagatttcggttggaatttgatatatcttagtggcggacgggtgagtaacgcgtgagtaacctgccgatgagagtggaataacgttctgaaaagaacgctaataccgcataacgtatcgaagccgcatgacattgataccaaagatttt

SEQ ID NO: 2082 - DNA, 225 bp, Unknown
  Encodes 16S rRNA from Clostridium_XICa
agagtttgatcctggctcaggatgaacgctggcggcgtgcctaacacatgcaagtcgagcggagagccgtaacggaagccttcgggtggaagatacggttacttagcggcggacgggtgagtaacgcgtggataacctggctcatacagggggataacagagagaaatttctgctaataccgcataagcgcacgtaaccgcatggttatgtgtgaaaagccgaga

SEQ ID NO: 2083 - DNA, 225 bp, Unknown
  Encodes 16S rRNA from Lachnospiracea_incertae_sedis
agagtttgatcatggctcaggataaacgctggcggcgtgcttaacacatgcaagtcgaacggagtattccttcggaagatcgaagagcttgctcggagagattctttggaatacttagtggcggacgggtgagtaacgcgtgggtaacctgcctcacacagggggataacagttggaaacgactgttaataccgcataagcgcacagtaccgcatggtacagtgt

SEQ ID NO: 2084 - DNA, 225 bp, Unknown
  Encodes 16S rRNA from Erysipelotrichaceae_incertae_sedis
agagtttgatcctggctcaggatgaacgctggcggcatgcctaatacatgcaagtcgaacggagaaggaaggtgcttgcatcttccggatcagtggcgaacgggtgagtaacacgtaggtaacctgcccatgtacccgggacaacggttggaaacgactgctaaaaccggataggcatatggaaggcatcttcgatatgttaaaggggccacggccctggacatg

SEQ ID NO: 2085 - DNA, 225 bp, Unknown
  Encodes 16S rRNA from Solobacterium
agagtttgatcctggctcaggataaacgctggcggcgtgcctaatacatgcaagtcgatcgctggaattcaagcttgcttgaatgaaggagaggcgaacgggtgagtaatacataagcaacctgcccacgaagactgggataatctctggaaacggggactaataccggataggtaacgaaggcgcatgcctctgttattaaagatgagaagcactggtggatgg

SEQ ID NO: 2086 - DNA, 225 bp, Unknown
  Encodes 16S rRNA from Lachnospiracea_incertae_sedis
agagtttgatcatggctcaggatgaacgctggcggcgtgcttaacacatgcaagtcgaacggagtatctctcccgagaccaaagaagcttgcttctgaggaatcaattgagatacttagtggcggacgggtgagtaacgcgtgggtaacctgcctcacacagggggataacagttggaaacgactgttaataccgcataagcgcacagtaccgcatggtacagtg

SEQ ID NO: 2087 - DNA, 225 bp, Unknown
  Encodes 16S rRNA from Clostridium_XlVa
agagtttgatcctggctcaggatgaacgctggcggcgtgcctaacacatgcaagtcgaacggagatataacgctgcagagacttcggtcaaagcttgttgtatcttagtggcggacgggtgagtaacgcgtgggcaacctgcctcatactgggggataacagttggaaacggctgttaataccgcataagcgcacagagtcgcatgactcagtgtgaaaaactcc

SEQ ID NO: 2088 - DNA, 225 bp, Unknown
  Encodes 16S rRNA from Ralstonia
agagtttgatcatggctcagattgaacgctggcggcatgccttacacatgcaagtcgaacggcagcatgatctagcttgctagattgatggcgagtggcgaacgggtgagtaatacatcggaacgtgccctgtagtgggggataactagtcgaaagattagctaataccgcatacgacctgagggtgaaagtgggggaccgcaaggcctcatgctataggagcgg

SEQ ID NO: 2089 - DNA, 225 bp, Unknown
  Encodes 16S rRNA from Clostridium_XlVa
agagtttgatcctggctcaggatgaacgctggcggcgtgcctaacacatgcaagtcgaacggaagcttaacgctgacgagacttcggtcaaatcttgttaagctttagtggcggacgggtgagtaacgcgtgggcaacctgcctcatactgggggataacagttggaaacgactgttaataccgcataagcgcacagagtcgcatgactcagtgtgaaaaactcc

SEQ ID NO: 2090 - DNA, 225 bp, Unknown
  Encodes 16S rRNA from Eubacterium
agagtttgatcatggctcaggatgaacgctggcggcgtgcctaacacatgcaagtcgagcgggaagctcacaaatgattcttcggatgaatgcgtgagtgaacagcggcggacgggtgagtaacgcgtgggcaacctgccccttactgaaggatagccgagggaaacttcgagtaatacttcataatgcatttttttcacatggagggaatgccaaagatttatc

SEQ ID NO: 2091 - DNA, 225 bp, Unknown
  Encodes 16S rRNA from Lachnobacterium
agagtttgatcatggctcaggatgaacgctggcggcgtgcttaacacatgcaagtcgaacgaagcacctctaatcgaagattgagaaagcttgcttttgattgattcaccttgaggtgactgagtggcggacgggtgagtaacgcgtgggtaacctaccctatacagggggataacagttggaaacgactgctaataccgcataagcgcacaggaccgcatggtc

SEQ ID NO: 2092 - DNA, 225 bp, Unknown
  Encodes 16S rRNA from Acholeplasma
agagtttgatcatggctcaggataaacgctggcggcatgcctaatacatgcaagtcgaacggagttaccttcgggtaacttagtggcgaacgggtgagtaacacgtaggtaatccatcccaaggacgaggatagcttctggaaacggaaggtaaaactggatagttaattaaagggcatcctttagttattaaaagagcaatctaccctgggaagagcctgcggc

SEQ ID NO: 2093 - DNA, 225 bp, Unknown
  Encodes 16S rRNA from Selenomonas
agagtttgatcctggctcaggacgaacgctggcggcgtgcttaacacatgcaagtcgaacgaggtcgaatgagaagcttgctttttatgaagccgagtggcaaacgggtgagtaacgcgtagacaacctgccgtgaagatggggacaacagatcgaaaggtctgctaataccgaatgttgtagatcctccgcatgaaggattcactaaaggtgccctctgtatat

SEQ ID NO: 2094 - DNA, 225 bp, Unknown
  Encodes 16S rRNA from Prevotella
agagtttgatcatggctcaggatgaacgctagctacaggcttaacacatgcaagtcgaggggcagcataacgaaagcttgcttttgttgatggcgaccggcgcacgggtgagtaacgcgtatccaaccttccctatagtagagaatagcccggcgaaagtcggattaatgctctatgttgtatttagaagacatctgaagaataccaaaggtttaccgctatagg

SEQ ID NO: 2095 - DNA, 225 bp, Unknown
  Encodes 16S rRNA from Clostridium_XlVa
agagtttgatcatggctcaggatgaacgctggcggcgtgcctaacacatgcaagtcgaacggagatttaacgctgatgaggcttcggcggaatcttgttaaatcttagtggcggacgggtgagtaacgcgtgggcaacctgcctcatactgggggataacagttggaaacgactgttaataccgcataagcgcacagtgtcgcatgacacagtgtgaaaaactcc

SEQ ID NO: 2096 - DNA, 225 bp, Unknown
  Encodes 16S rRNA from Succinivibrio
agagtttgatcatggctcagattgaacgctggcggcaggcctaatacatgcaagtcgaacggtaacatggaagtagcaatacttttgatgacgagtggcggacgggtgagtaatatttgggaatctacctatcagagggggatagcaactggaaacggttgataagaccgcgtacgctctgaggaggaaagtaatgggatcgcaagaccattagctgatagatga

SEQ ID NO: 2097 - DNA, 225 bp, Unknown; identical to SEQ ID NO: 2059
  Encodes 16S rRNA from Ruminobacter

SEQ ID NO: 2098 - DNA, 225 bp, Unknown
  Encodes 16S rRNA from Sharpea
agagtttgatcctggctcaggatgaacgctggcggcgtgcctaatacatgcaagtcggacggagcgcttcggcgctcagtggcgaacgggtgagtagcacatgggcaacctgcccttcagagggggacaacagctggaaacggctgctaagaccgcataggcgcggacgggacatcccgtccacgttaaacgtccttacggggacggctgaaggatgggcctgtg

SEQ ID NO: 2099 - DNA, 225 bp, Unknown
  Encodes 16S rRNA from Prevotella
agagtttgatcctggctcaggatgaacgctagctacaggcttaacacatgcaagtcgaggggaaacggcattttagcttgctaagatggacgtcgaccggcgaatgggtgagtaacgcgtatccaaccttccgttaagtagggaatagccttgcgaaagtaagattaatgccctatgtggtgttttgaggacatctgaagatcaccaaaggtttaccgcttaacg

SEQ ID NO: 2100 - DNA, 225 bp, Unknown
  Encodes 16S rRNA from Prevotella
agagtttgatcatggctcaggatgaacgctagctacaggcttaacacatgcaagtcgaggggtaacgacagcgaaagcttgcttttgctggtcgacgaccggcgaatgggtgagtaacgcgtatccaacctgccgcaaagtagggcacagccttgcgaaagtaagattaatgccctatgtgctgtgatgaggacatctgaattgcagtaaaggttcaccgctttg

SEQ ID NO: 2101 - DNA, 225 bp, Unknown; identical to SEQ ID NO: 2046
  Encodes 16S rRNA from Prevotella

SEQ ID NO: 2102 - DNA, 225 bp, Unknown
  Encodes 16S rRNA from Prevotella
agagtttgatcctggctcaggatgaacgctagctacaggcttaacacatgcaagtcgaggggcagcattatcgaagcttgctttgatagatggcgaccggcgcacgggtgagtaacgcgtatccaaccttccccttagtagggcatagcccgtagaaatgcggattaataccctatgttgtattatgaggacatctgaataataccaaaggttcaccgctaaggg

SEQ ID NO: 2103 - DNA, 225 bp, Unknown
  Encodes 16S rRNA from Prevotella
agagtttgatcatggctcaggatgaacgctagctacaggcttaacacatgcaagtcgaggggcatcagatcgaaagcttgcttttgatgctggcgaccggcgcacgggtgagtaacgcgtatccaaccttccctatagtagagaatagcccggcgaaagtcggattaatgctctatgttgtatttagaagacatctgaagaataccaaaggtttaccgctatagg

SEQ ID NO: 2104 - DNA, 225 bp, Unknown
  ITS sequence of Orpinomyces
tcctccgcttattgatatgcttaagttcagcgggtactcttatctgatttgagatcaagttattttgttaaatttccttttaattaggctcaactaaagttttaccttttaaaactgaaaagttattcctttttacgggaaaattttatccaattttattagataaaaccaaaattggcttttaaaaatcaatttaaagtgaaacaacttgtttatcgttgtaaa

SEQ ID NO: 2105 - DNA, 225 bp, Unknown
  ITS sequence of Piromyces
tcctccgcttattgatatgcttaagttcagcgggtactcttatctgatttgagatcaagttatttagttaaattttccttttagtttggattttctaatcaaaaattaaaattgtttaggttattcctttttacgggaaaattttatccaattttattttaaaattagaaaaattcaaattttaaaaaaatttaaagtgaaacaacttgtatcgttgtaaaacac

SEQ ID NO: 2106 - DNA, 225 bp, Unknown
  ITS sequence of Piromyces
tcctccgcttattgatatgcttaagttcagcgggtactcttatctgatttgagatcaagttatttagttaaattttcctttataattgaaaagaattctaatcaaaaattaaaattgtttaggttattccttttttacgggaaaattttatccaattttattttaaaattagaaaaattcaaattttaaaaaaaatttaaagtgaaacaacttgtatcgttgtaa

SEQ ID NO: 2107 - DNA, 225 bp, Unknown
  ITS sequence of Piromyces
tcctcgcttattgatatgcttaagttcagcgggtactcttatctgatttgagatcaagttatttattaaattttcctttataatgaaaaattctaatcaaaaaactaaaattgtttaggttattccttttttacgggaaaattttatccaattttattttaaaattagaaaaattcaaattttaaaaaaatttaaagtgaaacaacttgtatcgttgtaaaacac

SEQ ID NO: 2108 - DNA, 1525 bp, Unknown
  Encodes 16S rRNA from Ruminococcus bovis sp. nov.
aaattattagagagtttgatcctggctcaggatgaacgctggcggcgtgcctaacacatgcaagtcgaacggaacttctttgacagaattcttcggaaggaagttgattaagtttagtggcggacgggtgagtaacgcgtgagtaacctgcctttgagaggggaataacttcccgaaagggatgctaataccgcatgatgcatagaagtcgcatggcttttatgccaaagatttatcgctcaaagatggactcgcgtccgattagccagttggcggggtaacggcccaccaaagcgacgatcggtagccggactgagaggttgaacggccacattgggactgagacacggcccagactcctacgggaggcagcagtgggggatattgcgcaatgggggcaaccctgacgcagcaacgccgcgtgaaggatgaaggttttcggattgtaaacttcttttatttaggacgaacaatgacggtactaaatgaataagctccggctaactacgtgccagcagccgcggtaatacgtagggagcaagcgttatccggtttactgggtgtaaagggtgcgtaggcggcttggtaagtcagatgtgaaatgtatgggctcaacccatgaactgcatttgaaactattgagcttgagtgaagtagaggtaggcggaattcctgtgtagcggtgaaatgcgtagagatagggaggaacaccagtggcgaaggcggcctactgggctttaactgacgctgaggcacgaaagcgtgggtagcaaacaggattagataccctggtagtccacgctgtaaacgatgattactaggtgtggggggtctgaccccttccgtgccggagttaacacaataagtaatccacctggggagtacgaccgcaaggttgaaactcaaaggaattgacgggggcccgcacaagcagtggagtatgtggtttaattcgaagcaacgcgaagaaccttaccaggtcttgacatcgagtgacgaatctagagatagatttttccttcgggacacgaagacaggtggtgcatggttgtcgtcagctcgtgtcgtgagatgttgggttaagtcccgcaacgagcgcaacccttgctattagttgctacgcaagagcactctaataggactgccgttgacaaaacggaggaaggtggggacgacgtcaaatcatcatgccccttatgacctgggctacacacgtactacaatggatgttaacagagggaagcaaaatagcgatatggagcaaaccctaaaagcattcccagttcagattgcaggctgcaactcgcctgtatgaagttggaattgctagtaatcgcggatcagcatgccgcggtgaatacgttcgggccttgtacacaccgcccgtcacaccatggggagcggtaatacccgaagccagtagtttaaccttaggagagcgctgtcgaaggtaggattggcgactggggtgaagtcgtaacaaggtagccgtatcggaaggtgcggctggatcacctcctttcta

SEQ ID NO: 2109 - DNA, 297 bp, Ruminococcus bovis
gcaccaaatgcaaaggtatatttgattcttgcaggaatcttgccgtcaagtctgcgttcagaactgcgtttcataaaaaatcctccttaaatataaaaaatgaaactaaccgtacaaaatgcataaaagaaattaatattattaattattaatatgctttttgcttatctgttaactaaattatatgttttgtttcataaaaagtcaatatatttagtaaacaaaattaaagtttatctatttttcactaaacaacccttgcgtatttagtaaatattcactataataagggtagag

SEQ ID NO: 2110 - DNA, 297 bp, Ruminococcus bovis
gcaccaaatgcaaaggtatatttgattcttgcaggaatcttgccgtcaagtctgcgttcagaactgcgtttcataaaaaatcctccttaaatataaaaaatgaaactaaccgtacaaaatgcataaaagaaattaatattattaattattaatatgctttttgcttatctgttaactaaattatatgttttgtttcataaaaagtcaatatatttagtaaacaaaattaaagtttatctatttttcactaaacaacccttgcgtatttagtaaatattcactataataagggtagat

SEQ ID NO: 2111 - DNA, 307 bp, Ruminococcus bovis
tttcactcaataactgcattggacttttgtattcaagtgttctcattgtcttgttattactccattctaaatgtccttttaactttgtatttaattcttcaatatttttgaatgtttcccaatcatagaaatatctttggtcgtttctatgacttctttctaccttcccattgtgccaaggtgttcgtggtggtattaatttatgatttatacctaatttgttcaattctatttcaaaaggacttttcacttcactgctttgatatttatatgtgaactctcttccgttatctgtttgaaccgtctt

SEQ ID NO: 2112 - DNA, 307 bp, Ruminococcus bovis
tttcactcaataactgcattggacttttgtattcaagtgttctcattgtcttgttattactccattctaaatgtccttttaactttgtatttaattcttcaatatttttgaatgtttcccaatcatagaaatatctttggtcgtttctatgacttctttctaccttcccattgtgccaaggtgttcgtggtggtattaatttatgatttatacctaatttgttcaattctatttcaaaaggacttttcacttcactgctttgatatttatatgtgaactctcttccgttatctgtttgaatagtctg

SEQ ID NO: 2113 - DNA, 301 bp, Ruminococcus bovis
tattctctaaaagaaaataaatttgaacaatcatacaaattacaaaaatgaaattttctgttctggaataaaaagaccataaaagcaccgaaaaagcccatcagaatgggcttttctttatgttataaccgactaaaaataagtaaaaataaaatcaaaaaattttaaaaaaaactctttacaatactaaaaataggtgaaattatatacttatttttattgtattgaactttgttatattgtataatagttttagaaaattaatttaaggggtatattttatgcttgataatttttataa

SEQ ID NO: 2114 - DNA, 300 bp, Ruminococcus bovis
tattctctaaaagaaaataaatttgaacaatcatacaaattacaaaaatgaaattttctgttctggaataaaaagaccataaaagcaccgaaaaagcccatcagaatgggcttttctttatgttataaccgactaaaaataagtaaaaataaaatcaaaaaattttaaaaaaaactctttacaatactaaaaataggtgaaattatatacttatttttattgtattgaactttgttatattgtataatagttttagaaaattaatttaaggggtatattttatgcttgataatttttata

SEQ ID NO: 2115 - DNA, 118 bp, Ruminococcus bovis
cgccccaagaatgatagtgtttgcgttttttactaaaattccgttttaattctctgctgattgtagaaggacttcgttcaagtatttttgcaatttttcttatgctatatcctttcca

SEQ ID NO: 2116 - DNA, 118 bp, Ruminococcus bovis
cgccccaagaatgatagtgtttgcgttttttactaaaattccgttttaattctctgctgattgtagaaggacttcgttcaagtatttttgcaatttttcttatgctatatcctttttc

SEQ ID NO: 2117 - DNA, 106 bp, Ruminococcus bovis
ttactaaatattttacatgtgcgccccaagaatgatagtgtttgcgttttttactaaaattccgttttaattctctgctgattgtagaaggacttcgttcaagtat

SEQ ID NO: 2118 - DNA, 107 bp, Ruminococcus bovis
ttactaaatattttacatgtgcgccccaagaatgatagtgtttgcgttttttactaaaattccgttttaattctctgctgattgtagaaggacttcgttcaagtatt

SEQ ID NO: 2119 - DNA, 298 bp, Ruminococcus bovis
taatcagattgaacgcgatatcaattccgaaaatgccccgaatgttgttaaggattacacaagcaacgcgaaaatcaaaatctctccgctgggtatctctcttacgggcgagtgtgatgagaaatatgacaagcaaatgccggattggggcagtcgctgctttgagattcccgacacagacggcaaatcaaaggtaacaatggatgacggaacagtttattatatccttgtaaacgagggcggcgagcgcaggacagacgacagcggcgttttccatgagaatgcacagcttcaatac

SEQ ID NO: 2120 - DNA, 298 bp, Ruminococcus bovis
taatcagattgaacgcgatatcaattccgaaaatgccccgaatgttgttaaggattacacaagcaacgcgaaaatcaaaatctctccgctgggtatctctcttacgggcgagtgtgatgagaaatatgacaagcaaatgccggattggggcagtcgctgctttgagattcccgacacagacggcaaatcaaaggtaacaatggatgacggaacagtttattatatccttgtaaacgagggcggcgagcgcaggacagacgacagcggcgttttccatgagaatgcacagcttcaatat

SEQ ID NO: 2121 - DNA, 298 bp, Ruminococcus bovis
aaaaggtactgcaccatttactttgttagattattttccaaaggactttctgctttttgttgatgaaagccatgttactttacctcaggttagaggtatgtatggtggtaacctttcaagaaagaaaagtcttattgattatggctttagattaccgtcagcatatgacaaccgtcctttaaattttgatgaattttatgatagaataaatcaagtctgctttgtttcagcaacaccgggcgacttagaacttgaaaagagcagtgttgttgcagaacaaattatccgtccaacaggc

SEQ ID NO: 2122 - DNA, 298 bp, Ruminococcus bovis
aaaaggtactgcaccatttactttgttagattattttccaaaggactttctgctttttgttgatgaaagccatgttactttacctcaggttagaggtatgtatggtggtaacctttcaagaaagaaaagtcttattgattatggctttagattaccgtcagcatatgacaaccgtcctttaaattttgatgaattttatgatagaataaatcaagtctgctttgtttcagcaacaccgggcgacttagaacttgaaaagagcagtgttgttgcagaacaaattatccgtccaacagga

SEQ ID NO: 2123 - DNA, 202 bp, Ruminococcus bovis
tgccacaaaaaatataaatatataggggcaaaattacaactaaacacacccaaataatcaagacttgctctacttgtaaaatcagttggaaataaaaagtcaaaggactttttaaattctaaatcggtatttaccccaaaatatatacccagaataaaacctactaaaattgaaataagaaacatagtaaagataccgtatc

SEQ ID NO: 2124 - DNA, 204 bp, Ruminococcus bovis
tgccacaaaaaatataaatatataggggcaaaattacaactaaacacacacccaaataatcaagacttgctctacttgtaaaatcagttggaaataaaaagtcaaaggactttttaaattctaaatcggtatttaccccaaaatatatacccagaataaaacctactaaaattgaaataagaaacatagtaaagataccgtatc

What is claimed is:

1. An orally deliverable composition for increasing milk production or improving milk compositional characteristics in a ruminant, comprising:
a) Ruminococcus bovis comprising a 16S nucleic acid sequence of SEQ ID NO: 2108; and
b) a carrier suitable for oral ruminant administration.

2. The composition of claim 1, wherein the Ruminococcus bovis is deposited as PTA-125917, NRRL B-67764, TSD-225, or NCTC 14479.

3. The composition of claim 1, wherein the composition comprises:
a) one or more bacteria comprising a 16S nucleic acid sequence sharing at least about 97% sequence identity to any one of SEQ ID NOs: 1-30 and 2045-2103; and/or
b) one or more fungi comprising an ITS nucleic acid sequence sharing at least about 97% sequence identity to any one of SEQ ID NOs: 31-60 and 2104-2107.

4. The composition of claim 3, wherein the composition comprises:
a) a Clostridium sp. comprising a 16S nucleic acid sequence sharing at least about 97% sequence identity to SEQ ID NO: 28;
b) a Pichia sp. comprising an ITS nucleic acid sequence sharing at least about 97% sequence identity to SEQ ID NO: 32; and/or
c) a Butyrivibrio sp. comprising a 16S nucleic acid sequence sharing at least about 97% sequence identity to SEQ ID NO: 2067.

5. The composition of claim 4, wherein the composition comprises:
a) a Clostridium sp. with a deposit accession number of NRRL B-67248;
b) a Pichia sp. with a deposit accession number of NRRL Y-67249; and/or
c) a Butyrivibrio sp. with a deposit accession number of NRRL B-67347.

6. The composition of claim 1, wherein the Ruminococcus bovis comprises one or more mutations in the whole genome.

7. The composition of claim 6, wherein the one or more mutations are selected from the group consisting of:
a) a G→T substitution at position 297 of SEQ ID NO; 2109;
b) a CC→TA substitution at positions 301-302 of SEQ ID NO: 2111;
c) a T→G substitution at position 307 of SEQ ID NO: 2111;
d) a −A deletion at position 300 of SEQ ID NO: 2113;
e) a CCA→TTC substitution at positions 116-118 of SEQ ID NO: 2115;
f) a +T insertion between positions 105-106 of SEQ ID NO: 2117;
g) a C→T substitution at position 298 of SEQ ID NO: 2119;
h) a C→A substitution at position 298 of SEQ ID NO: 2121; and
i) a +AC insertion between positions 43-44 of SEQ ID NO: 2123.

8. An orally deliverable composition for increasing milk production or improving milk compositional characteristics in a ruminant, comprising:
a) Ruminococcus bovis comprising one or more mutations selected from the group consisting of:
i) a G→T substitution at position 297 of SEQ ID NO: 2109;
ii) a CC→TA substitution at positions 301-302 of SEQ ID NO: 2111;
iii) a T→G substitution at position 307 of SEQ ID NO: 2111;
iv) a −A deletion at position 300 of SEQ ID NO: 2113;
v) a CCA→TTC substitution at positions 116-118 of SEQ ID NO: 2115;
vi) a +T insertion between positions 105-106 of SEQ ID NO: 2117;
vii) a C→T substitution at position 298 of SEQ ID NO: 2119;
viii) a C→A substitution at position 298 of SEQ ID NO: 2121; and
ix) a +AC insertion between positions 43-44 of SEQ ID NO; 2123; and
b) a carrier suitable for oral ruminant administration.

9. The composition of claim 8, wherein the composition comprises:
a) one or more bacteria comprising a 16S nucleic acid sequence sharing at least about 97% sequence identity to any one of SEQ ID NOs: 1-30 and 2045-2103; and/or
b) one or more fungi comprising an ITS nucleic acid sequence sharing at least about 97% sequence identity to any one of SEQ ID NOs: 31-60 and 2104-2107.

10. The composition of claim 9, wherein the composition comprises:
a) a Clostridium sp. comprising a 16S nucleic acid sequence sharing at least about 97% sequence identity to SEQ ID NO: 28;
b) a Pichia sp. comprising an ITS nucleic acid sequence sharing at least about 97% sequence identity to SEQ ID NO: 32; and/or
c) a Butyrivibrio sp. comprising a 16S nucleic acid sequence sharing at least about 97% sequence identity to SEQ ID NO: 2067.

11. The composition of claim 10, wherein the composition comprises:
a) a Clostridium sp. with a deposit accession number of NRRL B-67248;
b) a Pichia sp. with a deposit accession number of NRRL Y-67249; and/or
c) a Butyrivibrio sp. with a deposit accession number of NRRL B-67347.

12. An orally deliverable composition for increasing milk production or improving milk compositional characteristics in a ruminant, comprising:
a) Ruminococcus bovis comprising a nucleic acid sequence selected from any one of SEQ ID NOs: 2110, 2112, 2114, 2116, 2118, 2120, 2122, or 2124; and
b) a carrier suitable for oral ruminant administration.

13. The composition of claim 12, wherein the composition comprises:
a) one or more bacteria comprising a 16S nucleic acid sequence sharing at least about 97% sequence identity to any one of SEQ ID NOs: 1-30 and 2045-2103; and/or
b) one or more fungi comprising an ITS nucleic acid sequence sharing at least about 97% sequence identity to any one of SEQ ID NOs: 31-60 and 2104-2107.

14. The composition of claim 13, wherein the composition comprises:
a) a Clostridium sp. comprising a 16S nucleic acid sequence sharing at least about 97% sequence identity to SEQ ID NO: 28;
b) a Pichia sp. comprising an ITS nucleic acid sequence sharing at least about 97% c sequence identity to SEQ ID NO: 32; and/or
c) a Butyrivibrio sp. comprising a 16S nucleic acid sequence sharing at least about 97% sequence identity to SEQ ID NO: 2067.

15. The composition of claim 14, wherein the composition comprises:
a) a Clostridium sp. with a deposit accession number of NRRL B-67248;
b) a Pichia sp. with a deposit accession number of NRRL Y-67249; and/or
c) a Butyrivibrio sp. with a deposit accession number of NRRL B-67347.

16. An orally deliverable composition for increasing milk production or improving milk compositional characteristics in a ruminant, comprising:
a) a Ruminococcus bovis with the deposit accession number PTA-125917, NRRL B-67764, TSD-225, or NCTC 14479; and
b) a carrier suitable for oral ruminant administration.

17. The composition of claim 16, wherein the composition comprises:
a) one or more bacteria comprising a 16S nucleic acid sequence sharing at least about 97% sequence identity to any one of SEQ ID NOs: 1-30 and 2045-2103; and/or
b) one or more fungi comprising an ITS nucleic acid sequence sharing at least about 97% sequence identity to any one of SEQ ID NOs: 31-60 and 2104-2107.

18. The composition of claim 17, wherein the composition comprises:
a) a Clostridium sp. comprising a 16S nucleic acid sequence sharing at least about 97% sequence identity to SEQ ID NO: 28;
b) a Pichia sp. comprising an ITS nucleic acid sequence sharing at least about 97% sequence identity to SEQ ID NO: 32; and/or
c) a Butyrivibrio sp. comprising a 16S nucleic acid sequence sharing at least about 97% sequence identity to SEQ ID NO: 2067.

19. The composition of claim 18, wherein the composition comprises:
a) a Clostridium sp. with a deposit accession number of NRRL B-67248;
b) a Pichia sp. with a deposit accession number of NRRL Y-67249; and/or
c) a Butyrivibrio sp. with a deposit accession number of NRRL B-67347.

20. The composition of claim 1, wherein the composition is formulated to protect Ruminococcus bovis from external stressors prior to entering the gastrointestinal tract of the ruminant.

21. The composition of claim 1, wherein the ruminant is a cow.

22. The composition of claim 1, wherein a ruminant administered the composition exhibit an increase in milk production that leads to an increase in milk yield or an increase in energy-corrected milk.

23. The composition of claim 1, wherein a ruminant administered the composition exhibits an improved milk compositional characteristic selected from the group consisting of: an increase in milk fat(s), an increase in milk protein(s), an increase of carbohydrates in milk, an increase of vitamins in milk, an increase of minerals in milk, or combinations thereof.

24. The composition of claim 1, wherein a ruminant administered the composition exhibits at least one improved phenotypic trait, selected from the group consisting of: an improved efficiency in feed utilization, improved digestibility, an increase in polysaccharide and lignin degradation, an increase in fatty acid concentration in the rumen, pH balance in the rumen, a reduction in methane emissions, a reduction in manure production, improved dry matter intake, an improved efficiency of nitrogen utilization, or combinations thereof.

25. The composition of claim 1, wherein the composition is formulated to protect the Ruminococcus bovis from oxidative stress.

26. The composition of claim 1, wherein the composition is formulated to protect the Ruminococcus bovis from moisture.

27. The composition of claim 1, wherein the composition is dry.

28. The composition of claim 1, wherein the composition is combined with food.

29. The composition of claim 1, wherein the composition is combined with cereal, starch, oilseed cake, or vegetable waste.

30. The composition of claim 1, wherein the composition is combined with hay, haylage, silage, livestock feed, forage, fodder, beans, grains, micro-ingredients, fermentation compositions, mixed ration, total mixed ration, or a mixture thereof.

31. The composition of claim 1, wherein the composition is formulated as a solid, liquid, or mixture thereof.

32. The composition of claim 1, wherein the composition is formulated as a pellet, capsule, granulate, or powder.

33. The composition of claim 1, wherein the composition is combined with water, medicine, vaccine, or a mixture thereof.

34. The composition of claim 1, wherein the composition is encapsulated.

35. The composition of claim 34, wherein the composition is encapsulated in a polymer or carbohydrate.

36. The composition of claim 1, wherein the Ruminococcus bovis is present in the composition in an amount of at least 10² cells.

37. A method for increasing milk production or improving milk compositional characteristics in a ruminant, the method comprising orally administering to a ruminant an effective amount of the composition of claim 1.

38. A method for increasing milk production or improving milk compositional characteristics in a ruminant, the method comprising orally administering to a ruminant an effective amount of the composition of claim 8.

39. A method for increasing milk production or improving milk compositional characteristics in a ruminant, the method comprising orally administering to a ruminant an effective amount of the composition of claim 12.

40. A method for increasing milk production or improving milk compositional characteristics in a ruminant, the method comprising orally administering to a ruminant an effective amount of the composition of claim 16.

41. The method according to claim 37, wherein the ruminant administered the effective amount of the ruminant supplement exhibits an increase in milk production that leads to a measured increase in milk yield.

42. The method according to claim 37, wherein the ruminant administered the effective amount of the ruminant supplement exhibits an increase in milk production and improved milk compositional characteristics that leads to a measured increase in energy-corrected milk.

43. The method according to claim 37, wherein the ruminant administered the effective amount of the ruminant supplement exhibits an improved milk compositional characteristic selected from the group consisting of: an increase in milk fat(s), an increase in milk protein(s), an increase of carbohydrates in milk, an increase of vitamins in milk, an increase of minerals in milk, or combinations thereof.

44. The method according to claim 37, wherein the ruminant administered the effective amount of the ruminant supplement exhibits at least a 1% increase in the average production of; milk fat(s), milk protein(s), energy-corrected milk, or combinations thereof.

45. The method according to claim 37, wherein the ruminant administered the effective amount of the ruminant supplement exhibits at least a 10% increase in the average production of: milk fat(s), milk protein(s), energy-corrected milk, or combinations thereof.

46. The method according to claim 37, wherein the ruminant administered the effective amount of the ruminant supplement exhibits at least a 20% increase in the average production of: milk fat(s), milk protein(s), energy-corrected milk, or combinations thereof.

47. The method according to claim 37, wherein the ruminant administered the effective amount of the ruminant supplement, further exhibits at least one improved phenotypic trait, selected from the group consisting of: an improved efficiency in feed utilization, improved digestibility, an increase in polysaccharide and lignin degradation, an increase in fatty acid concentration in the rumen, pH balance in the rumen, a reduction in methane emissions, a reduction in manure production, improved dry matter intake, an improved efficiency of nitrogen utilization, or combinations thereof.

48. The method according to claim 37, wherein the ruminant administered the effective amount of the ruminant supplement, further exhibits a shift in the microbiome of the rumen.

49. The method according to claim 37, wherein the ruminant administered the effective amount of the ruminant supplement, further exhibits a shift in the microbiome of the rumen, wherein a population of microbes present in the rumen before administration of the ruminant supplement increase in abundance after administration of the ruminant supplement.

50. The method according to claim 37, wherein the ruminant administered the effective amount of the ruminant supplement, further exhibits: a shift in the microbiome of the rumen, wherein a population of microbes present in the rumen before administration of the ruminant supplement decrease in abundance after administration of the ruminant supplement.

51. The method according to claim 37, wherein the ruminant administered the effective amount of the ruminant supplement, further exhibits: a shift in the microbiome of the rumen, wherein a first population of microbes present in the rumen before administration of the ruminant supplement increase in abundance after administration of the ruminant supplement, and wherein a second population of microbes present in the rumen before administration of the ruminant supplement decrease in abundance after administration of the ruminant supplement.

52. A composition comprising:
a) a Ruminococcus bovis with a deposit accession number of PTA-125917, NRRL B-67764, TSD-225, or NCTC 14479;
b) a Clostridium sp. with a deposit accession number of NRRL B-67248;
c) a Pichia sp. with a deposit accession number of NRRL Y-67249; and/or
d) a Butyrivibrio sp. with a deposit accession number of NRRL B-67347.

53. A composition that performs the same or better than recombinant bovine growth hormone for increasing milk production or improving milk compositional characteristics in a ruminant, wherein the composition comprises:
a) Ruminococcus bovis comprising a 16S nucleic acid sequence of SEQ ID NO: 2108; and
b) a carrier suitable for oral ruminant administration.

54. The composition of claim 53, wherein the composition comprises:
a) one or more bacteria comprising a 16S nucleic acid sequence sharing at least about 97% sequence identity to any one of SEQ ID NOs: 1-30 and 2045-2103; and/or
b) one or more fungi comprising an ITS nucleic acid sequence sharing at least about 97% sequence identity to any one of SEQ ID NOs: 31-60 and 2104-2107.

55. The composition of claim 54, wherein the composition comprises:
a) a Clostridium sp. comprising a 16S nucleic acid sequence sharing at least about 97% sequence identity to SEQ ID NO: 28;
b) a Pichia sp. comprising an ITS nucleic acid sequence sharing at least about 97% sequence identity to SEQ ID NO: 32; and/or
c) a Butyrivibrio sp. comprising a 16S nucleic acid sequence sharing at least about 97% sequence identity to SEQ ID NO: 2067.

56. The composition of claim 55, wherein the composition comprises:
a) a Clostridium sp. with a deposit accession number of NRRL B-67248;
b) a Pichia sp. with a deposit accession number of NRRL Y-67249; and/or
c) a Butyrivibrio sp. with a deposit accession number of NRRL B-67347.
